United States Patent Application Publication US 2025/0059260 A1 - sequence listing, part 2

SEQ ID NO: 6548 - protein, 5 aa, Homo sapiens
DYSMN

SEQ ID NO: 6549 - protein, 5 aa, Homo sapiens
DYSMY

SEQ ID NO: 6550 - protein, 14 aa, Homo sapiens
DYSRTIPLAGFLDQ

SEQ ID NO: 6551 - protein, 11 aa, Homo sapiens
DYSSGWYGIFY

SEQ ID NO: 6552 - protein, 14 aa, Homo sapiens
DYSSYVPSGGYFDY

SEQ ID NO: 6553 - protein, 14 aa, Homo sapiens
DYSTFIAVAGTFDY

SEQ ID NO: 6554 - protein, 14 aa, Homo sapiens
DYSTFIPMAGASDY

SEQ ID NO: 6555 - protein, 14 aa, Homo sapiens
DYSTYIPVTGTLDS

SEQ ID NO: 6556 - protein, 5 aa, Homo sapiens
DYTIS

SEQ ID NO: 6557 - protein, 5 aa, Homo sapiens
DYTMH

SEQ ID NO: 6558 - protein, 5 aa, Homo sapiens
DYVMH

SEQ ID NO: 6559 - protein, 5 aa, Homo sapiens
DYVMS

SEQ ID NO: 6560 - protein, 5 aa, Homo sapiens
DYVMT

SEQ ID NO: 6561 - protein, 13 aa, Homo sapiens
DYVSWGELRGLDY

SEQ ID NO: 6562 - protein, 13 aa, Homo sapiens
DYVVVTAVHAFDI

SEQ ID NO: 6563 - protein, 5 aa, Homo sapiens
DYWIG

SEQ ID NO: 6564 - protein, 5 aa, Homo sapiens
DYWMA

SEQ ID NO: 6565 - protein, 5 aa, Homo sapiens
DYWMS

SEQ ID NO: 6566 - protein, 5 aa, Homo sapiens
DYWMT

SEQ ID NO: 6567 - protein, 15 aa, Homo sapiens
DYYDSNGYYRTHFDY

SEQ ID NO: 6568 - protein, 16 aa, Homo sapiens
DYYDSSGHLWGGAFDI

SEQ ID NO: 6569 - protein, 12 aa, Homo sapiens
DYYDSSGYHFDY

SEQ ID NO: 6570 - protein, 5 aa, Homo sapiens
DYYID

SEQ ID NO: 6571 - protein, 5 aa, Homo sapiens
DYYIH

SEQ ID NO: 6572 - protein, 5 aa, Homo sapiens
DYYIQ

SEQ ID NO: 6573 - protein, 5 aa, Homo sapiens
DYYLH

SEQ ID NO: 6574 - protein, 5 aa, Homo sapiens
DYYMA

SEQ ID NO: 6575 - protein, 5 aa, Homo sapiens
DYYMD

SEQ ID NO: 6576 - protein, 5 aa, Homo sapiens
DYYMH

SEQ ID NO: 6577 - protein, 5 aa, Homo sapiens
DYYMN

SEQ ID NO: 6578 - protein, 5 aa, Homo sapiens
DYYMS

SEQ ID NO: 6579 - protein, 5 aa, Homo sapiens
DYYWN

SEQ ID NO: 6580 - protein, 5 aa, Homo sapiens
DYYWT

SEQ ID NO: 6581 - protein, 14 aa, Homo sapiens
EAGIVVVTQGYFDY

SEQ ID NO: 6582 - protein, 97 aa, Homo sapiens
EAQLLESGGDLIQPGGSLRLSCAASGFTFRNYAMSWVRQAPGKGLEWVSTISASGRGTYYPDSVRGRFTISRDNSKSTVYLQMNGLRVEDTAMYYCA

SEQ ID NO: 6583 - protein, 120 aa, Homo sapiens
EAQLLESGGDLIQPGGSLRLSCAASGFTFRNYAMSWVRQAPGKGLEWVSTISASGRGTYYPDSVRGRFTISRDNSKSTVYLQMNGLRVEDTAMYYCAGGSETSSYCFDPWGQGTLVTVSS

SEQ ID NO: 6584 - protein, 96 aa, Homo sapiens
EAQLVDSGGGLVQPGGSLRLSCTASGITVSDYYMNWVRQAPGKGLEWVSLLYPDGKTYYADSVRGRFAISRDNSRNTVYFQMNSLRTDDTAVYYCA

SEQ ID NO: 6585 - protein, 115 aa, Homo sapiens
EAQLVDSGGGLVQPGGSLRLSCTASGITVSDYYMNWVRQAPGKGLEWVSLLYPDGKTYYADSVRGRFAISRDNSRNTVYFQMNSLRTDDTAVYYCAGGDWGIDYWGQGTLVTVSS

SEQ ID NO: 6586 - protein, 100 aa, Homo sapiens
EAQLVESGGGLVKPGGSLRLSCAASGFTFSNAWMNWVRQAPGKGLEWVGRFKTYTDGGTTDYAAPVKGRFTISRDDSKNTLYLQMNSLKIEDTAVYYCTT

SEQ ID NO: 6587 - protein, 125 aa, Homo sapiens
EAQLVESGGGLVKPGGSLRLSCAASGFTFSNAWMNWVRQAPGKGLEWVGRFKTYTDGGTTDYAAPVKGRFTISRDDSKNTLYLQMNSLKIEDTAVYYCTTGWNDYGCCEDAFDIWGQGTMVTVSS

SEQ ID NO: 6588 - protein, 98 aa, Homo sapiens
EAQLVESGGGLVKPGGSLRLSCEVSGLIFSNALIHWVRQAPGKGLEWVGRIKSKTDGETTDYAAPVRGRFTISRDDSKNMVFLQMNSLRIEDTALYYC

SEQ ID NO: 6589 - protein, 117 aa, Homo sapiens
EAQLVESGGGLVKPGGSLRLSCEVSGLIFSNALIHWVRQAPGKGLEWVGRIKSKTDGETTDYAAPVRGRFTISRDDSKNMVFLQMNSLRIEDTALYYCYSNHAFDIWGQGTMVTVSS

SEQ ID NO: 6590 - protein, 97 aa, Homo sapiens
EAQLVESGGGLVQPGGSLRLSCAASGFKFDLWMMWVRQAPGKGLEWVANIKGDGSETHYVDSVKGRFTIFRDNSKNSMYLQMNSLRIEDTAVYYCAR

SEQ ID NO: 6591 - protein, 117 aa, Homo sapiens
EAQLVESGGGLVQPGGSLRLSCAASGFKFDLWMMWVRQAPGKGLEWVANIKGDGSETHYVDSVKGRFTIFRDNSKNSMYLQMNSLRIEDTAVYYCARDSGWNPPDFWGQGTLVTVSS

SEQ ID NO: 6592 - protein, 97 aa, Homo sapiens
EAQLVESGGGLVQPGGSLRLSCAASGFTISTYWMHWVRQAPGKGLVWVSRIKSDGSSTSYADSVKGRFTISRDNAKNTLYLQMNSLRAEDTAVYYCA

SEQ ID NO: 6593 - protein, 117 aa, Homo sapiens
EAQLVESGGGLVQPGGSLRLSCAASGFTISTYWMHWVRQAPGKGLVWVSRIKSDGSSTSYADSVKGRFTISRDNAKNTLYLQMNSLRAEDTAVYYCAGNWGRPVDYWGQGTLVTVSS

SEQ ID NO: 6594 - protein, 98 aa, Homo sapiens
EAQLVESGGGVVRPGGSLRLACAASGFTFDDYGMSWVRQVPGKGLECVSGINWNGDSTGYADSVKGRFTISRDNTNNALYLQMNSLRVEDTALYYCAR

SEQ ID NO: 6595 - protein, 122 aa, Homo sapiens
EAQLVESGGGVVRPGGSLRLACAASGFTFDDYGMSWVRQVPGKGLECVSGINWNGDSTGYADSVKGRFTISRDNTNNALYLQMNSLRVEDTALYYCARDHDYGDSDWYFDLWGRGTLVTVSS

SEQ ID NO: 6596 - protein, 98 aa, Homo sapiens
EAQLVQSGAEVKKPGATVRVSCKTSGYTFTNFYIHWVQQAPGKGLEWMGLVDPEDGKTMYAGKFQGRVTITADTSIDTAYMDLSSLRSEDTAVYFCAT

SEQ ID NO: 6597 - protein, 121 aa, Homo sapiens
EAQLVQSGAEVKKPGATVRVSCKTSGYTFTNFYIHWVQQAPGKGLEWMGLVDPEDGKTMYAGKFQGRVTITADTSIDTAYMDLSSLRSEDTAVYFCATMGYYDGTQRFDKWGQGTLVTVSS

SEQ ID NO: 6598 - protein, 98 aa, Homo sapiens
EAQLVQSGGGLVQPGGSLRLSCIASGFKFSDYWMTWVRQAPGKGLEWVANIKGDGSEKYYVDSVKGRFSISRDNAKNSMYLQMNSLRTEDTAVYYCAR

SEQ ID NO: 6599 - protein, 118 aa, Homo sapiens
EAQLVQSGGGLVQPGGSLRLSCIASGFKFSDYWMTWVRQAPGKGLEWVANIKGDGSEKYYVDSVKGRFSISRDNAKNSMYLQMNSLRTEDTAVYYCARDSSWNPPDYWGQGTLVTVSS

SEQ ID NO: 6600 - protein, 13 aa, Homo sapiens
EARGWNSRNWFDP

SEQ ID NO: 6601 - protein, 98 aa, Homo sapiens
EARLVESGGGLVQPGGSLRLSCTASGLSLTNYWMHWVRQVPGKGLMWVSQIKSDGSNIKYADAVKGRFTISRDNTKNTLYLQMNSLRPDDTAVYFCAR

SEQ ID NO: 6602 - protein, 119 aa, Homo sapiens
EARLVESGGGLVQPGGSLRLSCTASGLSLTNYWMHWVRQVPGKGLMWVSQIKSDGSNIKYADAVKGRFTISRDNTKNTLYLQMNSLRPDDTAVYFCARDDPGPRAFDFWGQGTMVTVSS

SEQ ID NO: 6603 - protein, 16 aa, Homo sapiens
EASGYSGYDRTFYFDY

SEQ ID NO: 6604 - protein, 7 aa, Homo sapiens
EASILEG

SEQ ID NO: 6605 - protein, 7 aa, Homo sapiens
EASKLES

SEQ ID NO: 6606 - protein, 7 aa, Homo sapiens
EASKRAT

SEQ ID NO: 6607 - protein, 7 aa, Homo sapiens
EASNLES

SEQ ID NO: 6608 - protein, 7 aa, Homo sapiens
EASNRAT

SEQ ID NO: 6609 - protein, 7 aa, Homo sapiens
EASRLES

SEQ ID NO: 6610 - protein, 7 aa, Homo sapiens
EASSLEG

SEQ ID NO: 6611 - protein, 7 aa, Homo sapiens
EASSLES

SEQ ID NO: 6612 - protein, 7 aa, Homo sapiens
EASSLET

SEQ ID NO: 6613 - protein, 7 aa, Homo sapiens
EASTLEG

SEQ ID NO: 6614 - protein, 7 aa, Homo sapiens
EASTLEN

SEQ ID NO: 6615 - protein, 7 aa, Homo sapiens
EASTLES

SEQ ID NO: 6616 - protein, 7 aa, Homo sapiens
EASTLQS

SEQ ID NO: 6617 - protein, 7 aa, Homo sapiens
EASTLVP

SEQ ID NO: 6618 - protein, 15 aa, Homo sapiens
EASWVGATTEDAFDI

SEQ ID NO: 6619 - protein, 10 aa, Homo sapiens
EAVAASYLNY

SEQ ID NO: 6620 - protein, 16 aa, Homo sapiens
EAVCGGDCPPGVWFDP

SEQ ID NO: 6621 - protein, 95 aa, Homo sapiens
EAVMTQSPATLSVSPGDRATLSCRASQSVSSKVVWYQQKPGQAPRLLIYDASTRATGIPARFSGSGSGTEFTLTISSMQAEDFAVYYCQQYYSWS

SEQ ID NO: 6622 - protein, 106 aa, Homo sapiens
EAVMTQSPATLSVSPGDRATLSCRASQSVSSKVVWYQQKPGQAPRLLIYDASTRATGIPARFSGSGSGTEFTLTISSMQAEDFAVYYCQQYYSWSSFGQGTKVEIK

SEQ ID NO: 6623 - protein, 20 aa, Homo sapiens
EAYCGGDCPEQNYYYYYMDV

SEQ ID NO: 6624 - protein, 7 aa, Homo sapiens
EDDHRPS

SEQ ID NO: 6625 - protein, 17 aa, Homo sapiens
EDGERMENRFTSWYFDY

SEQ ID NO: 6626 - protein, 7 aa, Homo sapiens
EDKKRPS

SEQ ID NO: 6627 - protein, 21 aa, Homo sapiens
EDLQDYFGLGTHRLRTGGLDS

SEQ ID NO: 6628 - protein, 7 aa, Homo sapiens
EDNKRPS

SEQ ID NO: 6629 - protein, 7 aa, Homo sapiens
EDNQRPS

SEQ ID NO: 6630 - protein, 98 aa, Homo sapiens
EDQLLESGGALVQPGGSLRLSCAASGFSISSYTMTWVRQAPGKGLEWVSSIIGGGVSTYYADSVKGRFTLSRDNSKNTLYVQMNSLRAEDTAVYYCAR

SEQ ID NO: 6631 - protein, 122 aa, Homo sapiens
EDQLLESGGALVQPGGSLRLSCAASGFSISSYTMTWVRQAPGKGLEWVSSIIGGGVSTYYADSVKGRFTLSRDNSKNTLYVQMNSLRAEDTAVYYCARDSRRWLQSAAFDYWGQGTLVTVSS

SEQ ID NO: 6632 - protein, 7 aa, Homo sapiens
EDRDRPS

SEQ ID NO: 6633 - protein, 7 aa, Homo sapiens
EDRKRPS

SEQ ID NO: 6634 - protein, 7 aa, Homo sapiens
EDSKRPS

SEQ ID NO: 6635 - protein, 7 aa, Homo sapiens
EDSRRFS

SEQ ID NO: 6636 - protein, 7 aa, Homo sapiens
EDTERPS

SEQ ID NO: 6637 - protein, 7 aa, Homo sapiens
EDTKRPS

SEQ ID NO: 6638 - protein, 17 aa, Homo sapiens
EDWGHSDSDGWSNRGDC

SEQ ID NO: 6639 - protein, 12 aa, Homo sapiens
EDYSSYYYGMDV

SEQ ID NO: 6640 - protein, 98 aa, Homo sapiens
EELVVESGGGLVQPGGSLRLSCAASGFTFSAYWMNWVRQAPGKGLEWVASIKHDGSEEKYVDSVKGRFTVSRDNAMNSLYLQMNSLRVEDTAVYYCAR

SEQ ID NO: 6641 - protein, 123 aa, Homo sapiens
EELVVESGGGLVQPGGSLRLSCAASGFTFSAYWMNWVRQAPGKGLEWVASIKHDGSEEKYVDSVKGRFTVSRDNAMNSLYLQMNSLRVEDTAVYYCARSHSSEDSAYRPSSVWGQGTVVTVSS

SEQ ID NO: 6642 - protein, 19 aa, Homo sapiens
EENSGYNPDHYYYYFGMDV

SEQ ID NO: 6643 - protein, 97 aa, Homo sapiens
EEQLLESGGDLVQPGGSLRLSCAASGFTFSNYAMGWVRQAPGKGLEWVSDIISGGRTYYADSVKGRFTVSRDNSKDTLYLQMNSLRAEDTALYYCAK

SEQ ID NO: 6644 - protein, 119 aa, Homo sapiens
EEQLLESGGDLVQPGGSLRLSCAASGFTFSNYAMGWVRQAPGKGLEWVSDIISGGRTYYADSVKGRFTVSRDNSKDTLYLQMNSLRAEDTALYYCAKSRGARVGAFDIWGQGTMVTVSS

SEQ ID NO: 6645 - protein, 98 aa, Homo sapiens
EEQLLESGGGLVQPGGSLRLSCAASGFTFSRYAMKWVRQAPGKGLEWVSAISGSGISTYYADSVKGRFTISRDNSKNTLYLQMNSLRAEDTAVYYCAK

SEQ ID NO: 6646 - protein, 125 aa, Homo sapiens
EEQLLESGGGLVQPGGSLRLSCAASGFTFSRYAMKWVRQAPGKGLEWVSAISGSGISTYYADSVKGRFTISRDNSKNTLYLQMNSLRAEDTAVYYCAKDLEFDNVMVVAGLIGYWGQGILVTVSS

SEQ ID NO: 6647 - protein, 98 aa, Homo sapiens
EEQLLESGGGLVQPGGSLRLSCVASGFTFSRYGMKWVRQAPGKGLEWVSHISGSGLSRYYADSVKGRFTISRDNSKNMLYLQMNRLGAEDTAVYYCTK

SEQ ID NO: 6648 - protein, 125 aa, Homo sapiens
EEQLLESGGGLVQPGGSLRLSCVASGFTFSRYGMKWVRQAPGKGLEWVSHISGSGLSRYYADSVKGRFTISRDNSKNMLYLQMNRLGAEDTAVYYCTKDLAYDNVMAVAGVIASWGQGILVAVSS

SEQ ID NO: 6649 - protein, 98 aa, Homo sapiens
EEQLLESGGGLVQPRGSLRLSCAASGFTFSGYWMSWVRQAPGKGLEWVSTISATGGSTYYADSVKGRFTISRDNSKKTLYLQMHSLRAEDTAIYFCAK

SEQ ID NO: 6650 - protein, 123 aa, Homo sapiens
EEQLLESGGGLVQPRGSLRLSCAASGFTFSGYWMSWVRQAPGKGLEWVSTISATGGSTYYADSVKGRFTISRDNSKKTLYLQMHSLRAEDTAIYFCAKAHDRRVPNQGFMDVWGKGTTVTVSS

SEQ ID NO: 6651 - protein, 97 aa, Homo sapiens
EEQLVESGGGLVQPGGSLRLSCAASGFHFYIYSINWVRQAPGRGLEYVSTISGDGRHTYYAESVKGRFTISRDNSKNTVYLQMDTLRTEDTAMYYCA

SEQ ID NO: 6652 - protein, 120 aa, Homo sapiens
EEQLVESGGGLVQPGGSLRLSCAASGFHFYIYSINWVRQAPGRGLEYVSTISGDGRHTYYAESVKGRFTISRDNSKNTVYLQMDTLRTEDTAMYYCARPLNWGGDAFEIWGRGTMVTVSS

SEQ ID NO: 6653 - protein, 97 aa, Homo sapiens
EEQLVESGGGLVQPGGSLRLSCAASGFTFSIYAMHWVRQAPGKGLEYVSTISGDGRSTYYADSVKGRFTVSRDNSKNTLYLQMGSLRPDDMAVYYCA

SEQ ID NO: 6654 - protein, 120 aa, Homo sapiens
EEQLVESGGGLVQPGGSLRLSCAASGFTFSIYAMHWVRQAPGKGLEYVSTISGDGRSTYYADSVKGRFTVSRDNSKNTLYLQMGSLRPDDMAVYYCARTLRWGGDAFDVWGQGTVVTVSS

SEQ ID NO: 6655 - protein, 97 aa, Homo sapiens
EEQLVESGGGLVQPGGSLRLSCAASGFTFSIYSLNWVRQAPGKGLEYVSTISGNGRSTYYANSVKGRFTISRDNSKNTVYLQMSSLRPEDMAVYYCA

SEQ ID NO: 6656 - protein, 120 aa, Homo sapiens
EEQLVESGGGLVQPGGSLRLSCAASGFTFSIYSLNWVRQAPGKGLEYVSTISGNGRSTYYANSVKGRFTISRDNSKNTVYLQMSSLRPEDMAVYYCARPLNWGGDAFDIWGQGTMVTVSS

SEQ ID NO: 6657 - protein, 98 aa, Homo sapiens
EEQLVESGGGLVQPGGSLRLSCAASGFTSSSYWMSWVRQAPGKGLEWVANIQEDGTEKYYEDSVKGRFTISRDNPKNSLYLEMNSLRAEDTALYYCAR

SEQ ID NO: 6658 - protein, 120 aa, Homo sapiens
EEQLVESGGGLVQPGGSLRLSCAASGFTSSSYWMSWVRQAPGKGLEWVANIQEDGTEKYYEDSVKGRFTISRDNPKNSLYLEMNSLRAEDTALYYCARAWDGHSAAYDIWGQGTMVTVSS

SEQ ID NO: 6659 - protein, 98 aa, Homo sapiens
EEQLVESGGGLVQPGGSLRLSCTASGFSFSSYSMNWVRQGPGKGLEWLSYISSSSKTIYYADSVKGRFTISRDNAKNSLYLQMNSLRVEDTAVYHCVR

SEQ ID NO: 6660 - protein, 112 aa, Homo sapiens
EEQLVESGGGLVQPGGSLRLSCTASGFSFSSYSMNWVRQGPGKGLEWLSYISSSSKTIYYADSVKGRFTISRDNAKNSLYLQMNSLRVEDTAVYHCVRGLLWGQGTLVTVSS

SEQ ID NO: 6661 - protein, 97 aa, Homo sapiens
EEQLVESGGTLVQPGGSLRLSCAASGFHFYIYSINWVRQAPGRGLEYLSTISGDGRHTYYAESVKGRFTISRDNSKDTVYLQMDTLRTDDTAMYYCA

SEQ ID NO: 6662 - protein, 120 aa, Homo sapiens
EEQLVESGGTLVQPGGSLRLSCAASGFHFYIYSINWVRQAPGRGLEYLSTISGDGRHTYYAESVKGRFTISRDNSKDTVYLQMDTLRTDDTAMYYCARPLNWGGDAFEIWGRGTMVTVSS

SEQ ID NO: 6663 - protein, 98 aa, Homo sapiens
EEQLVQSGAEVKKPGESLKISCQGSGYTFQNYWIGWVRQVAGKGLEWMGVIYPGDSDTRYTSSFEGQVTISADRSVSTAYLHWNSLKASDTAMYYCAR

SEQ ID NO: 6664 - protein, 124 aa, Homo sapiens
EEQLVQSGAEVKKPGESLKISCQGSGYTFQNYWIGWVRQVAGKGLEWMGVIYPGDSDTRYTSSFEGQVTISADRSVSTAYLHWNSLKASDTAMYYCARALSPGGSLPTMTFASWGQGTLVAVSS

SEQ ID NO: 6665 - protein, 17 aa, Homo sapiens
EETKGYCTNGVCYNFDY

SEQ ID NO: 6666 - protein, 10 aa, Homo sapiens
EEVEGATLDN

SEQ ID NO: 6667 - protein, 13 aa, Homo sapiens
EEVGGSKSWYWAY

SEQ ID NO: 6668 - protein, 12 aa, Homo sapiens
EEVHYYYYGMDV

SEQ ID NO: 6669 - protein, 7 aa, Homo sapiens
EEYLYDY

SEQ ID NO: 6670 - protein, 13 aa, Homo sapiens
EEYTSGLLPWFDS

SEQ ID NO: 6671 - protein, 5 aa, Homo sapiens
EFAIH

SEQ ID NO: 6672 - protein, 17 aa, Homo sapiens
EFEMYCRAGTCYWAYDS

SEQ ID NO: 6673 - protein, 5 aa, Homo sapiens
EFGMY

SEQ ID NO: 6674 - protein, 97 aa, Homo sapiens
EFQLVASGGGLVQPGGSLRLSCAASGFTFRNYWMHWVRQAPGKGLVWVSRINGDGSSTDYADSVKGRFTISRDNGKSTLFLQMSSLRAEDTAVYYCA

SEQ ID NO: 6675 - protein, 118 aa, Homo sapiens
EFQLVASGGGLVQPGGSLRLSCAASGFTFRNYWMHWVRQAPGKGLVWVSRINGDGSSTDYADSVKGRFTISRDNGKSTLFLQMSSLRAEDTAVYYCATTFSSDGGAFWGQGTLATVSS

SEQ ID NO: 6676 - protein, 17 aa, Homo sapiens
EFRFGQLSLSRHDAFDM

SEQ ID NO: 6677 - protein, 16 aa, Homo sapiens
EFTHRGRTNYNPSLES

SEQ ID NO: 6678 - protein, 94 aa, Homo sapiens
EFVLTQSPATLSLSPGERATLSCRASQSLGSSLAWYQQKPGQAPRLLIFDASNRATGIPARFSGSGSGTDFTLTISSLEPEDFAVYYCQQRSNW

SEQ ID NO: 6679 - protein, 105 aa, Homo sapiens
EFVLTQSPATLSLSPGERATLSCRASQSLGSSLAWYQQKPGQAPRLLIFDASNRATGIPARFSGSGSGTDFTLTISSLEPEDFAVYYCQQRSNWLTFGGGTKVEI

SEQ ID NO: 6680 - protein, 95 aa, Homo sapiens
EFVLTQSPGTLSLSPGERAALSCRASQSISDNYLAWYQQKPGQAPRLLIYGASNRATGIPDRFSGSGSGTDFTLTISRLESEDFAVYYCQQYGSS

SEQ ID NO: 6681 - protein, 108 aa, Homo sapiens
EFVLTQSPGTLSLSPGERAALSCRASQSISDNYLAWYQQKPGQAPRLLIYGASNRATGIPDRFSGSGSGTDFTLTISRLESEDFAVYYCQQYGSSTGTFGQGTRVEIK

SEQ ID NO: 6682 - protein, 95 aa, Homo sapiens
EFVLTQSPGTLSLSPGERATLSCRASQSISDNSLAWYQQKPGQAPRLLIYGASSRATGIPDRFSGSGSGTDFTLIISRLEAEDFAVYYCQQYGGS

SEQ ID NO: 6683 - protein, 108 aa, Homo sapiens
EFVLTQSPGTLSLSPGERATLSCRASQSISDNSLAWYQQKPGQAPRLLIYGASSRATGIPDRFSGSGSGTDFTLIISRLEAEDFAVYYCQQYGGSTGTFGQGTKVDIK

SEQ ID NO: 6684 - protein, 95 aa, Homo sapiens
EFVLTQSPGTLSLSPGERATLSCRASQSVSGNYLAWYQQKPGQAPRLLIYGASSRATGIPDRFSGSGSGTDFTLTISRLESEDFAVYYCQQYGSS

SEQ ID NO: 6685 - protein, 108 aa, Homo sapiens
EFVLTQSPGTLSLSPGERATLSCRASQSVSGNYLAWYQQKPGQAPRLLIYGASSRATGIPDRFSGSGSGTDFTLTISRLESEDFAVYYCQQYGSSTGTFGQGTKVEIK

SEQ ID NO: 6686 - protein, 95 aa, Homo sapiens
EFVLTQSPGTLSLSPGESATLSCRASQSVSDNYLAWYQQKPGQAPRLLIYGASSRATGIPDRFSGSGSGTDFTLTISRLESEDFAVYYCQQYGGS

SEQ ID NO: 6687 - protein, 108 aa, Homo sapiens
EFVLTQSPGTLSLSPGESATLSCRASQSVSDNYLAWYQQKPGQAPRLLIYGASSRATGIPDRFSGSGSGTDFTLTISRLESEDFAVYYCQQYGGSTGTFGQGTKVEIK

SEQ ID NO: 6688 - protein, 10 aa, Homo sapiens
EGAAGTYFDY

SEQ ID NO: 6689 - protein, 11 aa, Homo sapiens
EGAHNYQHFDH

SEQ ID NO: 6690 - protein, 11 aa, Homo sapiens
EGDSLREYYAT

SEQ ID NO: 6691 - protein, 14 aa, Homo sapiens
EGGETIYAPSWFDP

SEQ ID NO: 6692 - protein, 12 aa, Homo sapiens
EGGLWFGEPLNY

SEQ ID NO: 6693 - protein, 20 aa, Homo sapiens
EGGRRDIVVVPAAVGSAFDI

SEQ ID NO: 6694 - protein, 13 aa, Homo sapiens
EGGSFPLGGYMDV

SEQ ID NO: 6695 - protein, 14 aa, Homo sapiens
EGGVVGPTLGRIDY

SEQ ID NO: 6696 - protein, 9 aa, Homo sapiens
EGGWLAPDY

SEQ ID NO: 6697 - protein, 16 aa, Homo sapiens
EGGYGDLPPYSYGMNV

SEQ ID NO: 6698 - protein, 16 aa, Homo sapiens
EGGYYSGSETYGVFDF

SEQ ID NO: 6699 - protein, 98 aa, Homo sapiens
EGHLEESGGGLVQPGGSLRLSCAASGFRFSDYSINWVRQAPGKGLEWISYITSRSRTVYYAGSVKGRFTISRDNAKNSLYLQMNSLRAEDTAVYYCAR

SEQ ID NO: 6700 - protein, 125 aa, Homo sapiens
EGHLEESGGGLVQPGGSLRLSCAASGFRFSDYSINWVRQAPGKGLEWISYITSRSRTVYYAGSVKGRFTISRDNAKNSLYLQMNSLRAEDTAVYYCAREGGYGDLPPYSYGMNVWGQGTTVTVSS

SEQ ID NO: 6701 - protein, 13 aa, Homo sapiens
EGHSSGRCGAFDI

SEQ ID NO: 6702 - protein, 13 aa, Homo sapiens
EGHTSGHCGAFNL

SEQ ID NO: 6703 - protein, 13 aa, Homo sapiens
EGHTSGRCGTFDP

SEQ ID NO: 6704 - protein, 11 aa, Homo sapiens
EGNIIGTRSVH

SEQ ID NO: 6705 - protein, 11 aa, Homo sapiens
EGNTIHWFFDL

SEQ ID NO: 6706 - protein, 16 aa, Homo sapiens
EGPSWGVATIKDALDY

SEQ ID NO: 6707 - protein, 98 aa, Homo sapiens
EGQLLESGGGLVQPGGSLRLSCAASGFTFSTYAMNWVRQAPGKGLEWVSTISGSGNSTYYADSVKGRFTISRDNSRNTLYMQMKSLRAEDTAKYYCAK

SEQ ID NO: 6708 - protein, 127 aa, Homo sapiens
EGQLLESGGGLVQPGGSLRLSCAASGFTFSTYAMNWVRQAPGKGLEWVSTISGSGNSTYYADSVKGRFTISRDNSRNTLYMQMKSLRAEDTAKYYCAKGYSTLWFGEFLTPYFFDSWGQGTQVSVSS

SEQ ID NO: 6709 - protein, 18 aa, Homo sapiens
EGRLGRGYSYGYNWYFDL

SEQ ID NO: 6710 - protein, 12 aa, Homo sapiens
EGRSTIAGAFDI

SEQ ID NO: 6711 - protein, 16 aa, Homo sapiens
EGSDILTHYHPQILHY

SEQ ID NO: 6712 - protein, 16 aa, Homo sapiens
EGSDISTHYHPQILHY

SEQ ID NO: 6713 - protein, 12 aa, Homo sapiens
EGSGWRDDAFDI

SEQ ID NO: 6714 - protein, 11 aa, Homo sapiens
EGSGWYGAFDI

SEQ ID NO: 6715 - protein, 7 aa, Homo sapiens
EGSHRPS

SEQ ID NO: 6716 - protein, 7 aa, Homo sapiens
EGSILQG

SEQ ID NO: 6717 - protein, 7 aa, Homo sapiens
EGSKRPS

SEQ ID NO: 6718 - protein, 13 aa, Homo sapiens
EGSRGFYFPGIDY

SEQ ID NO: 6719 - protein, 17 aa, Homo sapiens
EGSSCDEAKCAEGSFDC

SEQ ID NO: 6720 - protein, 17 aa, Homo sapiens
EGSSCDEARCAEGSFDR

SEQ ID NO: 6721 - protein, 7 aa, Homo sapiens
EGTKRPS

SEQ ID NO: 6722 - protein, 7 aa, Homo sapiens
EGTKRPS

SEQ ID NO: 6723 - protein, 18 aa, Homo sapiens
EGTNYYDSSGYKSSAFDI

SEQ ID NO: 6724 - protein, 7 aa, Homo sapiens
EGTYFDY

SEQ ID NO: 6725 - protein, 12 aa, Homo sapiens
EGVDDFGAYFDY

SEQ ID NO: 6726 - protein, 14 aa, Homo sapiens
EGVTTEGYYYYMDV

SEQ ID NO: 6727 - protein, 12 aa, Homo sapiens
EGYCTGGGCYPI

SEQ ID NO: 6728 - protein, 16 aa, Homo sapiens
EGYDILTGYAKDAFDI

SEQ ID NO: 6729 - protein, 12 aa, Homo sapiens
EGYSSAPHALDV

SEQ ID NO: 6730 - protein, 13 aa, Homo sapiens
EGYTSSRCGAFDI

SEQ ID NO: 6731 - protein, 17 aa, Homo sapiens
EGYYGSGNYYKPSYFDY

SEQ ID NO: 6732 - protein, 13 aa, Homo sapiens
EHHYYDSSGSIQH

SEQ ID NO: 6733 - protein, 96 aa, Homo sapiens
EIAMTQSPATLSVSPGERATLSCRASQSITRDLAWYQQKPGQAPRLLIYDASTRATGIPARFSGSGSGTEFTLTISSLQSEDFAIYYCQQYNNWPP

SEQ ID NO: 6734 - protein, 108 aa, Homo sapiens
EIAMTQSPATLSVSPGERATLSCRASQSITRDLAWYQQKPGQAPRLLIYDASTRATGIPARFSGSGSGTEFTLTISSLQSEDFAIYYCQQYNNWPPITFGQGTKLEIK

SEQ ID NO: 6735 - protein, 16 aa, Homo sapiens
EIDDRRATNYNPSLQS

SEQ ID NO: 6736 - protein, 16 aa, Homo sapiens
EIDDRRNINYSPSLKS

SEQ ID NO: 6737 - protein, 16 aa, Homo sapiens
EIDHGGSTNDNTSLKS

SEQ ID NO: 6738 - protein, 96 aa, Homo sapiens
EIEMTQSPGTLSVSPGERATLSCRASQSVGSNLAWFQQKPGQAPRLLIYGASTRATGIPARFSGGGSGTDFTLTIDSIESEDFAVYYCQQSDNWPP

SEQ ID NO: 6739 - protein, 108 aa, Homo sapiens
EIEMTQSPGTLSVSPGERATLSCRASQSVGSNLAWFQQKPGQAPRLLIYGASTRATGIPARFSGGGSGTDFTLTIDSIESEDFAVYYCQQSDNWPPLTFGGGTKVEIK

SEQ ID NO: 6740 - protein, 96 aa, Homo sapiens
EIFLTQSPGTLSLSPGGRATLSCRASQSVSNSRLAWYQQKPGQAPRLIIHGASSRATGIPDRFSGSGSGTDFTLTISRLEPEDFAVYYCQQYRSSP

SEQ ID NO: 6741 - protein, 108 aa, Homo sapiens
EIFLTQSPGTLSLSPGGRATLSCRASQSVSNSRLAWYQQKPGQAPRLIIHGASSRATGIPDRFSGSGSGTDFTLTISRLEPEDFAVYYCQQYRSSPLTFGGGTKVEIK

SEQ ID NO: 6742 - protein, 95 aa, Homo sapiens
EIGLSQSPGTLSLSPGERATLSCRASQSVNSNYLAWYQKKPDQAPRLLIYGASNRATGIPDRFSGSGSGTEFTLTISRLEPEDFAVYYCQQYGSS

SEQ ID NO: 6743 - protein, 107 aa, Homo sapiens
EIGLSQSPGTLSLSPGERATLSCRASQSVNSNYLAWYQKKPDQAPRLLIYGASNRATGIPDRFSGSGSGTEFTLTISRLEPEDFAVYYCQQYGSSSLTFGGGTKVEI

SEQ ID NO: 6744 - protein, 16 aa, Homo sapiens
EIHHSGNTNYNPSLNG

SEQ ID NO: 6745 - protein, 16 aa, Homo sapiens
EIHHSGTTNYNPSLKS

SEQ ID NO: 6746 - protein, 14 aa, Homo sapiens
EIHSLAQGYQSLRD

SEQ ID NO: 6747 - protein, 17 aa, Homo sapiens
EIIGMFGTANYAQKFQG

SEQ ID NO: 6748 - protein, 96 aa, Homo sapiens
EIILTQSPATLSLSPGERATLSCRASQSVSTSLAWYQQRPGQPPRLLIYEASKRATGIPARFSGSGSGTDFTLTISSLEPEDFAVYYCQHRSGWPP

SEQ ID NO: 6749 - protein, 108 aa, Homo sapiens
EIILTQSPATLSLSPGERATLSCRASQSVSTSLAWYQQRPGQPPRLLIYEASKRATGIPARFSGSGSGTDFTLTISSLEPEDFAVYYCQHRSGWPPITFGQGTRLEVK

SEQ ID NO: 6750 - protein, 95 aa, Homo sapiens
EIIMTQSPATLSVSPGERATLSCRASQSVGTNLAWYQQKPGQVPRLLISGASTRATGIPARFSGSGSGTEFTLTISSMQSEDFAVYYCQQYDGWP

SEQ ID NO: 6751 - protein, 107 aa, Homo sapiens
EIIMTQSPATLSVSPGERATLSCRASQSVGTNLAWYQQKPGQVPRLLISGASTRATGIPARFSGSGSGTEFTLTISSMQSEDFAVYYCQQYDGWPRLFGQGTKVEIK

SEQ ID NO: 6752 - protein, 96 aa, Homo sapiens
EIIMTQSPATLSVSPGERATLSCRASQSVSSSLAWYQQKPGQAPRLLIYGASTRATGIPVRFSGSGSGTEFTLTITGLQSEDFAVYYCQQYNNWPP

SEQ ID NO: 6753 - protein, 108 aa, Homo sapiens
EIIMTQSPATLSVSPGERATLSCRASQSVSSSLAWYQQKPGQAPRLLIYGASTRATGIPVRFSGSGSGTEFTLTITGLQSEDFAVYYCQQYNNWPPITFGQGTRLEIK

SEQ ID NO: 6754 - protein, 17 aa, Homo sapiens
EIIPLFGTVNYAQKFQG

SEQ ID NO: 6755 - protein, 17 aa, Homo sapiens
EIIPVFGTPNYAQRFQG

SEQ ID NO: 6756 - protein, 93 aa, Homo sapiens
EILLTQSPGTLSLSPGERATLSCRASQSVRGNFLAWYQQKPGQTPRLLIYGASSRATGIPDRFSGSGSGTDFTLTISRLEPEDFAVYYCQQYD

SEQ ID NO: 6757 - protein, 107 aa, Homo sapiens
EILLTQSPGTLSLSPGERATLSCRASQSVRGNFLAWYQQKPGQTPRLLIYGASSRATGIPDRFSGSGSGTDFTLTISRLEPEDFAVYYCQQYDIVLTFGGGTKVEIK

SEQ ID NO: 6758 - protein, 96 aa, Homo sapiens
EILLTQSPGTLSLSPGERATLSCRASQSVSSSYLAWYQQKFGQAPRLLIYGASSRATGIPDRFSASGSGADFTLTISRLEPEDVAVYYCQQYGSSP

SEQ ID NO: 6759 - protein, 108 aa, Homo sapiens
EILLTQSPGTLSLSPGERATLSCRASQSVSSSYLAWYQQKFGQAPRLLIYGASSRATGIPDRFSASGSGADFTLTISRLEPEDVAVYYCQQYGSSPYTFGQGTKLEIK

SEQ ID NO: 6760 - protein, 95 aa, Homo sapiens
EILMTQSPATLSVSPGERASLSCRASQSVSNYLAWYQQKPGQVPRLLIYGASTRATGTPARFSGSGSGTEFTLTISSVQSEDFAVYYCQQYNHWP

SEQ ID NO: 6761 - protein, 107 aa, Homo sapiens
EILMTQSPATLSVSPGERASLSCRASQSVSNYLAWYQQKPGQVPRLLIYGASTRATGTPARFSGSGSGTEFTLTISSVQSEDFAVYYCQQYNHWPRMFGQGTKVEIK

SEQ ID NO: 6762 - protein, 96 aa, Homo sapiens
EILMTQSPATLSVSPGERATLSCRASQNVASNLAWYQQKPGQPPRLLIYGASTRAPSIPARFTGTGSGTDFTLTISSLQSEDFAVYYCQQYYNWPP

SEQ ID NO: 6763 - protein, 108 aa, Homo sapiens
EILMTQSPATLSVSPGERATLSCRASQNVASNLAWYQQKPGQPPRLLIYGASTRAPSIPARFTGTGSGTDFTLTISSLQSEDFAVYYCQQYYNWPPITFGAGTKVEIK

SEQ ID NO: 6764 - protein, 96 aa, Homo sapiens
EILMTQSPATLSVSPGERATLSCRASQSVNSNLAWYQQKPGQAPRLLIYGASTRATGIPARFSGSGSGTEFTLTIGSMQSEDFAVYYCQQYNNWPP

SEQ ID NO: 6765 - protein, 108 aa, Homo sapiens
EILMTQSPATLSVSPGERATLSCRASQSVNSNLAWYQQKPGQAPRLLIYGASTRATGIPARFSGSGSGTEFTLTIGSMQSEDFAVYYCQQYNNWPPLTFGGGTKVKIK

SEQ ID NO: 6766 - protein, 96 aa, Homo sapiens
EILMTQSPATLSVSPGERATLSCRASQSVSSNLAWYQQKPGQAPRLLIYGASTRATGIPARFSGSGSGTEFTLTISSLQSEDFAVYYCQQYNNWPP

SEQ ID NO: 6767 - protein, 108 aa, Homo sapiens
EILMTQSPATLSVSPGERATLSCRASQSVSSNLAWYQQKPGQAPRLLIYGASTRATGIPARFSGSGSGTEFTLTISSLQSEDFAVYYCQQYNNWPPITFGQGTRLEIK

SEQ ID NO: 6768 - protein, 96 aa, Homo sapiens
EILMTQSPATLSVSPGERATLSCRASQTISSDLAWYQQKPGQAPRLLIYGASNRATGIPARFSGSGSGTEFTLTISSLQSDDFAVYYCQQYNNWPP

SEQ ID NO: 6769 - protein, 108 aa, Homo sapiens
EILMTQSPATLSVSPGERATLSCRASQTISSDLAWYQQKPGQAPRLLIYGASNRATGIPARFSGSGSGTEFTLTISSLQSDDFAVYYCQQYNNWPPITFGQGTRLEIK

SEQ ID NO: 6770 - protein, 96 aa, Homo sapiens
EILMTQSPSTLSVSPGERATLSCRASQSVGSNLAWYQQKPGQAPRLLLYGASTRATGIPARFSGSGSGTDFTLTISNLQSEDFAVYYCQQYNNWPP

SEQ ID NO: 6771 - protein, 109 aa, Homo sapiens
EILMTQSPSTLSVSPGERATLSCRASQSVGSNLAWYQQKPGQAPRLLLYGASTRATGIPARFSGSGSGTDFTLTISNLQSEDFAVYYCQQYNNWPPKLTFGGGTKVAIK

SEQ ID NO: 6772 - protein, 11 aa, Homo sapiens
EILYGGYYYDY

SEQ ID NO: 6773 - protein, 95 aa, Homo sapiens
EIMLTQSPGTLSLSPGERATLSCRASQNIDSTSLAWYQQTPGQAPRLLIYGGSSRATGAPDRFSGSGSGTEFTLTVNRLEPEDFAVYYCQQYGSS

SEQ ID NO: 6774 - protein, 108 aa, Homo sapiens
EIMLTQSPGTLSLSPGERATLSCRASQNIDSTSLAWYQQTPGQAPRLLIYGGSSRATGAPDRFSGSGSGTEFTLTVNRLEPEDFAVYYCQQYGSSILTFGGGTKVEIK

SEQ ID NO: 6775 - protein, 96 aa, Homo sapiens
EIMMTQSPATVSVSPGERATLSCRASQSVDNKLAWYQQKTGQTPRLLIYGASTRATGIPARFSGSGSGTEFTLSISSVQSEDFAVYYCQQYSNWPP

SEQ ID NO: 6776 - protein, 109 aa, Homo sapiens
EIMMTQSPATVSVSPGERATLSCRASQSVDNKLAWYQQKTGQTPRLLIYGASTRATGIPARFSGSGSGTEFTLSISSVQSEDFAVYYCQQYSNWPPAYSFGQGTRLEIK

SEQ ID NO: 6777 - protein, 16 aa, Homo sapiens
EINDRGNTRYNPSLKS

SEQ ID NO: 6778 - protein, 16 aa, Homo sapiens
EINHNGRTNYNPSLTS

SEQ ID NO: 6779 - protein, 16 aa, Homo sapiens
EINHSGITNYSPALKS

SEQ ID NO: 6780 - protein, 16 aa, Homo sapiens
EINHSGRTNYNPPLKS

SEQ ID NO: 6781 - protein, 16 aa, Homo sapiens
EINHSGSINYNPSLKS

SEQ ID NO: 6782 - protein, 16 aa, Homo sapiens
EINHSGSTNYNPSLKS

SEQ ID NO: 6783 - protein, 17 aa, Homo sapiens
EINHSGSTTNNNASLKS

SEQ ID NO: 6784 - protein, 16 aa, Homo sapiens
EINHSGTTRTNPSLES

SEQ ID NO: 6785 - protein, 16 aa, Homo sapiens
EINHTGGTTYNPSLKS

SEQ ID NO: 6786 - protein, 16 aa, Homo sapiens
EINQNGRTRANPSLES

SEQ ID NO: 6787 - protein, 16 aa, Homo sapiens
EINQSGRTDYNPSLKS

SEQ ID NO: 6788 - protein, 16 aa, Homo sapiens
EINQSGTAKYNPSLTS

SEQ ID NO: 6789 - protein, 16 aa, Homo sapiens
EINRSGSTNYLPSLKS

SEQ ID NO: 6790 - protein, 16 aa, Homo sapiens
EISHSGSANYNPSLKS

SEQ ID NO: 6791 - protein, 16 aa, Homo sapiens
EISHSGSTIYNPSLKS

SEQ ID NO: 6792 - protein, 16 aa, Homo sapiens
EISQSGKTNYNPSLKS

SEQ ID NO: 6793 - protein, 7 aa, Homo sapiens
EISSRVS

SEQ ID NO: 6794 - protein, 18 aa, Homo sapiens
EIVDYIAAAGTFYYGMDV

SEQ ID NO: 6795 - protein, 96 aa, Homo sapiens
EIVLAQSPATLSLSPGERATLSCRASQSLSSYLAWYQQKPGQAPRLLIYDASNRATGIPARFSGSGSGTDFTLTISSLEPEDFAVYYCQQRINWPP

SEQ ID NO: 6796 - protein, 109 aa, Homo sapiens
EIVLAQSPATLSLSPGERATLSCRASQSLSSYLAWYQQKPGQAPRLLIYDASNRATGIPARFSGSGSGTDFTLTISSLEPEDFAVYYCQQRINWPPSFTFGGGTKVEIK

SEQ ID NO: 6797 - protein, 96 aa, Homo sapiens
EIVLAQSPGTLSLSPGERATLSCRASQSVASSYLAWYQQKPGQAPRLLIYGASSRATGIPDRFSGSGSGTDFTLTISRLEPEDFAVYYCHQYGSSP

SEQ ID NO: 6798 - protein, 109 aa, Homo sapiens
EIVLAQSPGTLSLSPGERATLSCRASQSVASSYLAWYQQKPGQAPRLLIYGASSRATGIPDRFSGSGSGTDFTLTISRLEPEDFAVYYCHQYGSSPGSFTFGPGTKVDI

SEQ ID NO: 6799 - protein, 95 aa, Homo sapiens
EIVLMQSPGTLSLSPGERATLSCRASQGVSSNLAWYQQKPGQAPRLLIYGASSRATAIPDRFSASGSGTDFTLTISRLEAEDFAVYYCQQYGTSP

SEQ ID NO: 6800 - protein, 107 aa, Homo sapiens
EIVLMQSPGTLSLSPGERATLSCRASQGVSSNLAWYQQKPGQAPRLLIYGASSRATAIPDRFSASGSGTDFTLTISRLEAEDFAVYYCQQYGTSPYTFGQGTKLEIK

SEQ ID NO: 6801 - protein, 96 aa, Homo sapiens
EIVLMQSPGTLSLSPGERATLSCRASQGVSSNYLAWYQQKPGQAPRLLIYGASSRATAIPDRFSASGSGTDFTLTISRLEAEDFAVYYCQQYGSSP

SEQ ID NO: 6802 - protein, 108 aa, Homo sapiens
EIVLMQSPGTLSLSPGERATLSCRASQGVSSNYLAWYQQKPGQAPRLLIYGASSRATAIPDRFSASGSGTDFTLTISRLEAEDFAVYYCQQYGSSPSTFGQGTKLEIK

SEQ ID NO: 6803 - protein, 96 aa, Homo sapiens
EIVLMQSPGTLSLSPGERATLSCRASQSVTSNYLAWYQQKPGLAPRLVIYDASSRAAGIPDRFTGGGSGTDFTLTISRLEPEDFAVYYCQQYGGSP

SEQ ID NO: 6804 - protein, 108 aa, Homo sapiens
EIVLMQSPGTLSLSPGERATLSCRASQSVTSNYLAWYQQKPGLAPRLVIYDASSRAAGIPDRFTGGGSGTDFTLTISRLEPEDFAVYYCQQYGGSPLTFGGGTKVEIK

SEQ ID NO: 6805 - protein, 94 aa, Homo sapiens
EIVLRQSPGTLSLSPGERATLSCRASQSVNSNYLAWYQQKPGQAPRLLIYGASSRATDIPDRFSGSGSGADFTLTISRLEPEDFAVYYCQLYGG

SEQ ID NO: 6806 - protein, 107 aa, Homo sapiens
EIVLRQSPGTLSLSPGERATLSCRASQSVNSNYLAWYQQKPGQAPRLLIYGASSRATDIPDRFSGSGSGADFTLTISRLEPEDFAVYYCQLYGGFLTFGPGTKVDIK

SEQ ID NO: 6807 - protein, 95 aa, Homo sapiens
EIVLRQSPGTLSLSPGERATLSCRASQSVTSGNLAWYQQKPGQAPRLLIYGASSRAPGIPDRFSGSGSGTDFTLTIRRLEPDDFAVYYCQQYGSS

SEQ ID NO: 6808 - protein, 108 aa, Homo sapiens
EIVLRQSPGTLSLSPGERATLSCRASQSVTSGNLAWYQQKPGQAPRLLIYGASSRAPGIPDRFSGSGSGTDFTLTIRRLEPDDFAVYYCQQYGSSTLTFGGGTKVEIK

SEQ ID NO: 6809 - protein, 95 aa, Homo sapiens
EIVLRQSPGTLSLSPGERATLSCRASQSVTSSYLAWYQQKPGQAPRLLIYGASSRAPGIPDRFSGSGSGTDFTLTISRLEPDDFAVYYCQQYGSS

SEQ ID NO: 6810 - protein, 108 aa, Homo sapiens
EIVLRQSPGTLSLSPGERATLSCRASQSVTSSYLAWYQQKPGQAPRLLIYGASSRAPGIPDRFSGSGSGTDFTLTISRLEPDDFAVYYCQQYGSSTLTFGGGTKVEIK

SEQ ID NO: 6811 - protein, 96 aa, Homo sapiens
EIVLTQFPGTLSLSPGERATLSCRASQSVSNNYLAWYQQKPGQAPRLLISGSTSRPTGIPVRFSGSGSGTDFTLTISTLEPEDFAIYYCQQYGDSP

SEQ ID NO: 6812 - protein, 108 aa, Homo sapiens
EIVLTQFPGTLSLSPGERATLSCRASQSVSNNYLAWYQQKPGQAPRLLISGSTSRPTGIPVRFSGSGSGTDFTLTISTLEPEDFAIYYCQQYGDSPFTFGPGTRVEIK

SEQ ID NO: 6813 - protein, 96 aa, Homo sapiens
EIVLTQSPAILSLSLGERATLSCRASQSISTFLAWYQQKPGQAPRLLIYDASNRATGIPARFSGSGSGTDFTLTISSLEPEDFAVYYCLQRSNWPP

SEQ ID NO: 6814 - protein, 108 aa, Homo sapiens
EIVLTQSPAILSLSLGERATLSCRASQSISTFLAWYQQKPGQAPRLLIYDASNRATGIPARFSGSGSGTDFTLTISSLEPEDFAVYYCLQRSNWPPLTFGGGTKLEIK

SEQ ID NO: 6815 - protein, 95 aa, Homo sapiens
EIVLTQSPAILSLSPGERATLSCRASQNLASRFLAWYQQKPGHPPRLLIYGESSRGTDIPDRFSGSGSGTDFTLTISRLEPEDFAVYYCHQFGAS

SEQ ID NO: 6816 - protein, 108 aa, Homo sapiens
EIVLTQSPAILSLSPGERATLSCRASQNLASRFLAWYQQKPGHPPRLLIYGESSRGTDIPDRFSGSGSGTDFTLTISRLEPEDFAVYYCHQFGASQKTFGQGTKVEIK

SEQ ID NO: 6817 - protein, 95 aa, Homo sapiens
EIVLTQSPASLSVSPGERVTLSCRASQSVRNFLAWYQQKPGQAPRLLIYDASNRAAGVPDRFTGSGSGTDFTLTISSLEPEDFAVYYCQQRSKWP

SEQ ID NO: 6818 - protein, 108 aa, Homo sapiens
EIVLTQSPASLSVSPGERVTLSCRASQSVRNFLAWYQQKPGQAPRLLIYDASNRAAGVPDRFTGSGSGTDFTLTISSLEPEDFAVYYCQQRSKWPSITFGQGTRLEIK

SEQ ID NO: 6819 - protein, 95 aa, Homo sapiens
EIVLTQSPATLALSPGERATLSCRASQSVRSFLAWYQQKPGQAPRLLIYDASNRATGIPARFSGSGSGTDFTLTISSLEPEDFAVYYCQQRSNWP

SEQ ID NO: 6820 - protein, 108 aa, Homo sapiens
EIVLTQSPATLALSPGERATLSCRASQSVRSFLAWYQQKPGQAPRLLIYDASNRATGIPARFSGSGSGTDFTLTISSLEPEDFAVYYCQQRSNWPSITFGQGTRLEIK

SEQ ID NO: 6821 - protein, 96 aa, Homo sapiens
EIVLTQSPATLSLAPGERATLSCRASQSISNYLAWYQQKPGQAPRLLIYDASNRATDIPARFSGSGSGTDFTLTISNLEPEDFAVYYCQQRSNWPP

SEQ ID NO: 6822 - protein, 108 aa, Homo sapiens
EIVLTQSPATLSLAPGERATLSCRASQSISNYLAWYQQKPGQAPRLLIYDASNRATDIPARFSGSGSGTDFTLTISNLEPEDFAVYYCQQRSNWPPITFGQGTRLQIK

SEQ ID NO: 6823 - protein, 96 aa, Homo sapiens
EIVLTQSPATLSLSPGARATLSCRAGQSVGNHLAWYQQKPGQPPRLLIYDTSNRATGIPARFSGSGSGTDFTLTISSLEPEDFAVYYCQQRSNWPP

SEQ ID NO: 6824 - protein, 108 aa, Homo sapiens
EIVLTQSPATLSLSPGARATLSCRAGQSVGNHLAWYQQKPGQPPRLLIYDTSNRATGIPARFSGSGSGTDFTLTISSLEPEDFAVYYCQQRSNWPPITFGQGTRLEIK

SEQ ID NO: 6825 - protein, 95 aa, Homo sapiens
EIVLTQSPATLSLSPGDRATLSCRASQNIRNFLAWYQQKPGRAPRLLIYDASNRATGIPARFSGSGSGTDFTLTISSLEPEDFAIYYCQQRSKWP

SEQ ID NO: 6826 - protein, 108 aa, Homo sapiens
EIVLTQSPATLSLSPGDRATLSCRASQNIRNFLAWYQQKPGRAPRLLIYDASNRATGIPARFSGSGSGTDFTLTISSLEPEDFAIYYCQQRSKWPSITFGQGTRLEIK

SEQ ID NO: 6827 - protein, 96 aa, Homo sapiens
EIVLTQSPATLSLSPGDRATLSCRASQSVGSYLAWYQQKPGQPPRLLIYDASNRASGIPARFSGSGSGTDFTLTISSLESEDFAVYYCQQRSNWPP

SEQ ID NO: 6828 - protein, 108 aa, Homo sapiens
EIVLTQSPATLSLSPGDRATLSCRASQSVGSYLAWYQQKPGQPPRLLIYDASNRASGIPARFSGSGSGTDFTLTISSLESEDFAVYYCQQRSNWPPLTFGGGTKVEIK

SEQ ID NO: 6829 - protein, 96 aa, Homo sapiens
EIVLTQSPATLSLSPGDRATLSCRASQSVTTYLAWYQQKPGQAPRLLIYDASNRATGIPARFSGSGSGTDFTLTISSLEPEDFAVYYCQQRSNWPP

SEQ ID NO: 6830 - protein, 108 aa, Homo sapiens
EIVLTQSPATLSLSPGDRATLSCRASQSVTTYLAWYQQKPGQAPRLLIYDASNRATGIPARFSGSGSGTDFTLTISSLEPEDFAVYYCQQRSNWPPLTFGGGTKVEIK

SEQ ID NO: 6831 - protein, 95 aa, Homo sapiens
EIVLTQSPATLSLSPGERATISCRASQSVGRYLVWFQQKPGQAPRLLIYDASNRATGIPARFSGSGSGTDFTLTISSLEPEDFALYYCQQRSNWP

SEQ ID NO: 6832 - protein, 107 aa, Homo sapiens
EIVLTQSPATLSLSPGERATISCRASQSVGRYLVWFQQKPGQAPRLLIYDASNRATGIPARFSGSGSGTDFTLTISSLEPEDFALYYCQQRSNWPLTFGGGTKVEIK

SEQ ID NO: 6833 - protein, 95 aa, Homo sapiens
EIVLTQSPATLSLSPGERATLACRAGQSVSSYLAWYQKKPGQAPRLLIYDASNRATGIPARFSGSGSGTDFTLTISSLEPEDFAVYFCQQHSIWP

SEQ ID NO: 6834 - protein, 107 aa, Homo sapiens
EIVLTQSPATLSLSPGERATLACRAGQSVSSYLAWYQKKPGQAPRLLIYDASNRATGIPARFSGSGSGTDFTLTISSLEPEDFAVYFCQQHSIWPGTFGQGTKVEIK

SEQ ID NO: 6835 - protein, 95 aa, Homo sapiens
EIVLTQSPATLSLSPGERATLACRASQSVSRHLAWYQQKPGQAPRLLIYDASNRATGIPARFSGSGSGTDFTLTISSLEPEDFAVYYCQQRTNWP

SEQ ID NO: 6836 - protein, 108 aa, Homo sapiens
EIVLTQSPATLSLSPGERATLACRASQSVSRHLAWYQQKPGQAPRLLIYDASNRATGIPARFSGSGSGTDFTLTISSLEPEDFAVYYCQQRTNWPRITFGQGTRLENK

SEQ ID NO: 6837 - protein, 96 aa, Homo sapiens
EIVLTQSPATLSLSPGERATLSCGASQPVSSNNLAWYQQTPGLAPRLLIYDASNRATGIPDRFSGSGSGTDFTLTISGLEPEDFAVYYCQQYGSSP

SEQ ID NO: 6838 - protein, 108 aa, Homo sapiens
EIVLTQSPATLSLSPGERATLSCGASQPVSSNNLAWYQQTPGLAPRLLIYDASNRATGIPDRFSGSGSGTDFTLTISGLEPEDFAVYYCQQYGSSPRTFGPGTKVEIK

SEQ ID NO: 6839 - protein, 97 aa, Homo sapiens
EIVLTQSPATLSLSPGERATLSCGASQSVSGNYLAWYQQKPGLAPRLLIYDASSRATGIPDRFIGSGSGTDFILTISTLEPEDFAVYYCQQYGSSLP

SEQ ID NO: 6840 - protein, 109 aa, Homo sapiens
EIVLTQSPATLSLSPGERATLSCGASQSVSGNYLAWYQQKPGLAPRLLIYDASSRATGIPDRFIGSGSGTDFILTISTLEPEDFAVYYCQQYGSSLPATFGQGTKLEIK

SEQ ID NO: 6841 - protein, 95 aa, Homo sapiens
EIVLTQSPATLSLSPGERATLSCGASQSVSSNYLAWYQQKPGLAPRLLIYDAATRATGIPDRFSGSGSETNFTLTISRLEPEDFAVYYCQQYGTS

SEQ ID NO: 6842 - protein, 109 aa, Homo sapiens
EIVLTQSPATLSLSPGERATLSCGASQSVSSNYLAWYQQKPGLAPRLLIYDAATRATGIPDRFSGSGSETNFTLTISRLEPEDFAVYYCQQYGTSHSFTFGPGTKVDIK

SEQ ID NO: 6843 - protein, 96 aa, Homo sapiens
EIVLTQSPATLSLSPGERATLSCKASQSLSTSLAWYQQRPGQPPRLLIYDASNRATGIPARFSGSGSGTDFTLTISSLEPEDFAVYYCQQRFNWPP

SEQ ID NO: 6844 - protein, 108 aa, Homo sapiens
EIVLTQSPATLSLSPGERATLSCKASQSLSTSLAWYQQRPGQPPRLLIYDASNRATGIPARFSGSGSGTDFTLTISSLEPEDFAVYYCQQRFNWPPITFGQGTRLEIK

SEQ ID NO: 6845 - protein, 95 aa, Homo sapiens
EIVLTQSPATLSLSPGERATLSCRASQGVSSFLSWYQQRPGQAPRLLIYDASNRATGIPARFSGSGSGTDFTLTISSLETEDFAVYYCLQRSNWP

SEQ ID NO: 6846 - protein, 108 aa, Homo sapiens
EIVLTQSPATLSLSPGERATLSCRASQGVSSFLSWYQQRPGQAPRLLIYDASNRATGIPARFSGSGSGTDFTLTISSLETEDFAVYYCLQRSNWPSITFGQGTRLEIK

SEQ ID NO: 6847 - protein, 96 aa, Homo sapiens
EIVLTQSPATLSLSPGERATLSCRASQNVKNFLLWYSQSPGQPPRLLVHDASIRATGIPARFSGSGSGTDFTLTISSLEPEDSAIYFCQQRGTWPP

SEQ ID NO: 6848 - protein, 107 aa, Homo sapiens
EIVLTQSPATLSLSPGERATLSCRASQNVKNFLLWYSQSPGQPPRLLVHDASIRATGIPARFSGSGSGTDFTLTISSLEPEDSAIYFCQQRGTWPPTFGGGTRIEIK

SEQ ID NO: 6849 - protein, 96 aa, Homo sapiens
EIVLTQSPATLSLSPGERATLSCRASQSIANFLAWYQQRPGQAPRLLIYDASNRATGIPARFSGSGSGTDFTLTISSLEPEDFAVYYCQQRSNWPP

SEQ ID NO: 6850 - protein, 108 aa, Homo sapiens
EIVLTQSPATLSLSPGERATLSCRASQSIANFLAWYQQRPGQAPRLLIYDASNRATGIPARFSGSGSGTDFTLTISSLEPEDFAVYYCQQRSNWPPITFGQGTRLEIK

SEQ ID NO: 6851 - protein, 96 aa, Homo sapiens
EIVLTQSPATLSLSPGERATLSCRASQSIGTSLAWYQQRPGQAPRLLISDVSKRATDIPARFSGSGSGTDFTLTINSLEPEDFAVYYCQQRSNWPP

SEQ ID NO: 6852 - protein, 108 aa, Homo sapiens
EIVLTQSPATLSLSPGERATLSCRASQSIGTSLAWYQQRPGQAPRLLISDVSKRATDIPARFSGSGSGTDFTLTINSLEPEDFAVYYCQQRSNWPPLTFGGGTKVEIK

SEQ ID NO: 6853 - protein, 95 aa, Homo sapiens
EIVLTQSPATLSLSPGERATLSCRASQSINNFLAWYQQKPGQAPRLLIYDASNRATGIPARFSGSGSGTDFTLTISSLEPEDFAVYYCQQYNNWP

SEQ ID NO: 6854 - protein, 106 aa, Homo sapiens
EIVLTQSPATLSLSPGERATLSCRASQSINNFLAWYQQKPGQAPRLLIYDASNRATGIPARFSGSGSGTDFTLTISSLEPEDFAVYYCQQYNNWPGFGQGTKLEIK

SEQ ID NO: 6855 - protein, 95 aa, Homo sapiens
EIVLTQSPATLSLSPGERATLSCRASQSIRAYLAWYQQKPGQAPRLLIYDASNRATGIPARFSGSGSGTDFTLTISGLEPEDFAVYYCQQRSTWP

SEQ ID NO: 6856 - protein, 105 aa, Homo sapiens
EIVLTQSPATLSLSPGERATLSCRASQSIRAYLAWYQQKPGQAPRLLIYDASNRATGIPARFSGSGSGTDFTLTISGLEPEDFAVYYCQQRSTWPSFGGGTKVEI

SEQ ID NO: 6857 - protein, 94 aa, Homo sapiens
EIVLTQSPATLSLSPGERATLSCRASQSIRTSLAWYQQKPGQAPRLLIYDASNRATGIPARFSGSGSGTDFTLTISSLEPEDFAVYYCHQRSDW

SEQ ID NO: 6858 - protein, 108 aa, Homo sapiens
EIVLTQSPATLSLSPGERATLSCRASQSIRTSLAWYQQKPGQAPRLLIYDASNRATGIPARFSGSGSGTDFTLTISSLEPEDFAVYYCHQRSDWLMYTFGQGTRLEIK

SEQ ID NO: 6859 - protein, 96 aa, Homo sapiens
EIVLTQSPATLSLSPGERATLSCRASQSISNFLAWYQQKPGQAPRLLIYDASTRATGIPAKFSGSGSGTDFTLTISSLDPEDFAVYYCQQRSNWPP

SEQ ID NO: 6860 - protein, 108 aa, Homo sapiens
EIVLTQSPATLSLSPGERATLSCRASQSISNFLAWYQQKPGQAPRLLIYDASTRATGIPAKFSGSGSGTDFTLTISSLDPEDFAVYYCQQRSNWPPITFGQGTRLEIK

SEQ ID NO: 6861 - protein, 94 aa, Homo sapiens
EIVLTQSPATLSLSPGERATLSCRASQSISSSLVWYQQKPGQAPRLLIYEASNRATGIPARFSGSGSGTVFTLTISNLEPEDLAVYYCQQRGSW

SEQ ID NO: 6862 - protein, 106 aa, Homo sapiens
EIVLTQSPATLSLSPGERATLSCRASQSISSSLVWYQQKPGQAPRLLIYEASNRATGIPARFSGSGSGTVFTLTISNLEPEDLAVYYCQQRGSWLWTFGQGTKVEI

SEQ ID NO: 6863 - protein, 95 aa, Homo sapiens
EIVLTQSPATLSLSPGERATLSCRASQSITNYLAWYQQKPGQAPRLLIYDASNRATGVPARFSGSGSGTDFTLAISSLEPEDFAVYYCQQRSNWP

SEQ ID NO: 6864 - protein, 107 aa, Homo sapiens
EIVLTQSPATLSLSPGERATLSCRASQSITNYLAWYQQKPGQAPRLLIYDASNRATGVPARFSGSGSGTDFTLAISSLEPEDFAVYYCQQRSNWPRTFGPGTKVDLK

SEQ ID NO: 6865 - protein, 96 aa, Homo sapiens
EIVLTQSPATLSLSPGERATLSCRASQSLRNSLAWYQQRPGQAPRLLIYDASNRATGIPARFSGSGSGTDFTLTISSVEPEDFAVYYCQQYSNWPP

SEQ ID NO: 6866 - protein, 108 aa, Homo sapiens
EIVLTQSPATLSLSPGERATLSCRASQSLRNSLAWYQQRPGQAPRLLIYDASNRATGIPARFSGSGSGTDFTLTISSVEPEDFAVYYCQQYSNWPPITFGQGTRLEMK

SEQ ID NO: 6867 - protein, 96 aa, Homo sapiens
EIVLTQSPATLSLSPGERATLSCRASQSLSSNLAWYQQKPGQAPRLLIYDASNRATGIPARFSGSGSGTDFTLTISSLEPEDFAVYYCQQRSSWPP

SEQ ID NO: 6868 - protein, 108 aa, Homo sapiens
EIVLTQSPATLSLSPGERATLSCRASQSLSSNLAWYQQKPGQAPRLLIYDASNRATGIPARFSGSGSGTDFTLTISSLEPEDFAVYYCQQRSSWPPLITFGPGTKVDI

SEQ ID NO: 6869 - protein, 96 aa, Homo sapiens
EIVLTQSPATLSLSPGERATLSCRASQSLSSSLAWYQQTPGQAPRLLIYDASKRATGIPARFSGSGSGTDFTLTISSLEPEDFAVYYCQQCGNWPP

SEQ ID NO: 6870 - protein, 108 aa, Homo sapiens
EIVLTQSPATLSLSPGERATLSCRASQSLSSSLAWYQQTPGQAPRLLIYDASKRATGIPARFSGSGSGTDFTLTISSLEPEDFAVYYCQQCGNWPPITFGQGTRLDIK

SEQ ID NO: 6871 - protein, 96 aa, Homo sapiens
EIVLTQSPATLSLSPGERATLSCRASQSVGAYVAWYQQKPGQAPRLLIYDASHRATDIPARFSGSGSGTDFTLAISSVEPEDFAVYYCQQRANWPP

SEQ ID NO: 6872 - protein, 108 aa, Homo sapiens
EIVLTQSPATLSLSPGERATLSCRASQSVGAYVAWYQQKPGQAPRLLIYDASHRATDIPARFSGSGSGTDFTLAISSVEPEDFAVYYCQQRANWPPLTFGGGTKLEIK

SEQ ID NO: 6873 - protein, 94 aa, Homo sapiens
EIVLTQSPATLSLSPGERATLSCRASQSVGNSLAWFQQKPGQSPRLLIDDASNRATGIPARFSGSGSGTDFTLTISSLEPEDFGIYYCQQRSSW

SEQ ID NO: 6874 - protein, 108 aa, Homo sapiens
EIVLTQSPATLSLSPGERATLSCRASQSVGNSLAWFQQKPGQSPRLLIDDASNRATGIPARFSGSGSGTDFTLTISSLEPEDFGIYYCQQRSSWLSLTFGGGTTVEIK

SEQ ID NO: 6875 - protein, 96 aa, Homo sapiens
EIVLTQSPATLSLSPGERATLSCRASQSVGSYLAWYQQKPGQAPRLLIYDASNRATGIPARFSGSGSGTDFTLTISSLEAEDFAIYYCQQRSNWPP

SEQ ID NO: 6876 - protein, 108 aa, Homo sapiens
EIVLTQSPATLSLSPGERATLSCRASQSVGSYLAWYQQKPGQAPRLLIYDASNRATGIPARFSGSGSGTDFTLTISSLEAEDFAIYYCQQRSNWPPLTFGGGTKVEIK

SEQ ID NO: 6877 - protein, 90 aa, Homo sapiens
EIVLTQSPATLSLSPGERATLSCRASQSVKSFLAWFQQKPGQSPRLLIYDASNRATGIPARFSGSGSGTDFTLTISRLEPEDFAVYFCQQ

SEQ ID NO: 6878 - protein, 108 aa, Homo sapiens
EIVLTQSPATLSLSPGERATLSCRASQSVKSFLAWFQQKPGQSPRLLIYDASNRATGIPARFSGSGSGTDFTLTISRLEPEDFAVYFCQQYDRSSMYTFGQGTKLEIK

SEQ ID NO: 6879 - protein, 95 aa, Homo sapiens
EIVLTQSPATLSLSPGERATLSCRASQSVNKFLAWYQQKPGQAPRLLIYDASNRAAGIPARFSGSGSGTDFTLTISSLEPEDFAVYFCHQRSNWP

SEQ ID NO: 6880 - protein, 108 aa, Homo sapiens
EIVLTQSPATLSLSPGERATLSCRASQSVNKFLAWYQQKPGQAPRLLIYDASNRAAGIPARFSGSGSGTDFTLTISSLEPEDFAVYFCHQRSNWPFLTFGGGTKVEVK

SEQ ID NO: 6881 - protein, 96 aa, Homo sapiens
EIVLTQSPATLSLSPGERATLSCRASQSVNNYLAWYQEKPGQAPRLLIYDASNRATGIPARFSGSGSGTDFTLTISSLEPEDFAVYYCQQRSNWPP

SEQ ID NO: 6882 - protein, 108 aa, Homo sapiens
EIVLTQSPATLSLSPGERATLSCRASQSVNNYLAWYQEKPGQAPRLLIYDASNRATGIPARFSGSGSGTDFTLTISSLEPEDFAVYYCQQRSNWPPITFGQGTRLEIK

SEQ ID NO: 6883 - protein, 96 aa, Homo sapiens
EIVLTQSPATLSLSPGERATLSCRASQSVNNYLAWYQQKPGQAPRLLMYDASKRATGIPARFSGSGSGTDFTLTISSLEPEDFAVYYCQQRSNWPP

SEQ ID NO: 6884 - protein, 108 aa, Homo sapiens
EIVLTQSPATLSLSPGERATLSCRASQSVNNYLAWYQQKPGQAPRLLMYDASKRATGIPARFSGSGSGTDFTLTISSLEPEDFAVYYCQQRSNWPPLTFGGGTKVEIK

SEQ ID NO: 6885 - protein, 96 aa, Homo sapiens
EIVLTQSPATLSLSPGERATLSCRASQSVNSYLAWYQQKPGQAPRLLIYDASNRATGVPARFSGSGSGTDFTLTISSLEPEDFAVYYCQQRGNWPP

SEQ ID NO: 6886 - protein, 108 aa, Homo sapiens
EIVLTQSPATLSLSPGERATLSCRASQSVNSYLAWYQQKPGQAPRLLIYDASNRATGVPARFSGSGSGTDFTLTISSLEPEDFAVYYCQQRGNWPPLTFGGGTKVEIK

SEQ ID NO: 6887 - protein, 94 aa, Homo sapiens
EIVLTQSPATLSLSPGERATLSCRASQSVNTYLAWYQQKPGQAPRLLIYDASNRAAGIPARFSGSGSGTDFTLTISSLEPEDFAVYYCQQRSNW

SEQ ID NO: 6888 - protein, 107 aa, Homo sapiens
EIVLTQSPATLSLSPGERATLSCRASQSVNTYLAWYQQKPGQAPRLLIYDASNRAAGIPARFSGSGSGTDFTLTISSLEPEDFAVYYCQQRSNWSWTFGQGTKVEIK

SEQ ID NO: 6889 - protein, 95 aa, Homo sapiens
EIVLTQSPATLSLSPGERATLSCRASQSVRNFLAWYQQKPGQPPRLLIYDASNRATGVPVRFSGSGSGTDFTLTISGLEPEDFAVYYCQQRSKWP

SEQ ID NO: 6890 - protein, 108 aa, Homo sapiens
EIVLTQSPATLSLSPGERATLSCRASQSVRNFLAWYQQKPGQPPRLLIYDASNRATGVPVRFSGSGSGTDFTLTISGLEPEDFAVYYCQQRSKWPSITFGQGTRLELK

SEQ ID NO: 6891 - protein, 95 aa, Homo sapiens
EIVLTQSPATLSLSPGERATLSCRASQSVRSFLAWYQQKPGQAPRLLIYDAFKRATGIPARFSGSGSGTDFTLIISSLEPEDFAVYYCQQRSNWP

SEQ ID NO: 6892 - protein, 108 aa, Homo sapiens
EIVLTQSPATLSLSPGERATLSCRASQSVRSFLAWYQQKPGQAPRLLIYDAFKRATGIPARFSGSGSGTDFTLIISSLEPEDFAVYYCQQRSNWPQVTFGQGTRLEIK

SEQ ID NO: 6893 - protein, 95 aa, Homo sapiens
EIVLTQSPATLSLSPGERATLSCRASQSVRSFLAWYQQKPGQAPRLLIYDASNRATGIPARFSGSGSGTDFTLTISSLEPDDFAVYYCQQRSNWP

SEQ ID NO: 6894 - protein, 108 aa, Homo sapiens
EIVLTQSPATLSLSPGERATLSCRASQSVRSFLAWYQQKPGQAPRLLIYDASNRATGIPARFSGSGSGTDFTLTISSLEPDDFAVYYCQQRSNWPSITFGQGTRLEIK

SEQ ID NO: 6895 - protein, 92 aa, Homo sapiens
EIVLTQSPATLSLSPGERATLSCRASQSVSDYLAWYQQKPGQAPRLLIYDASNRATGIPARFSGSGSGTDFTLTISSLEPEDFAVYYCQQRS

SEQ ID NO: 6896 - protein, 105 aa, Homo sapiens
EIVLTQSPATLSLSPGERATLSCRASQSVSDYLAWYQQKPGQAPRLLIYDASNRATGIPARFSGSGSGTDFTLTISSLEPEDFAVYYCQQRSSLRTFGQGTRVEI

SEQ ID NO: 6897 - protein, 95 aa, Homo sapiens
EIVLTQSPATLSLSPGERATLSCRASQSVSGNYLAWYQQKPGQAPRLLIFGASRRATDIPDRFSGSGSGTDFSLTISRLEPEDFAVYYCQQYSVS

SEQ ID NO: 6898 - protein, 110 aa, Homo sapiens
EIVLTQSPATLSLSPGERATLSCRASQSVSGNYLAWYQQKPGQAPRLLIFGASRRATDIPDRFSGSGSGTDFSLTISRLEPEDFAVYYCQQYSVSLSKYTFGQGTKLEIK

SEQ ID NO: 6899 - protein, 96 aa, Homo sapiens
EIVLTQSPATLSLSPGERATLSCRASQSVSGYLAWYQQKPGQAPRLLIYDAFNRATGIPARFSGSGSGTDFTLTISSLEPEDFAVYYCQQRSNWPP

SEQ ID NO: 6900 - protein, 108 aa, Homo sapiens
EIVLTQSPATLSLSPGERATLSCRASQSVSGYLAWYQQKPGQAPRLLIYDAFNRATGIPARFSGSGSGTDFTLTISSLEPEDFAVYYCQQRSNWPPITFGQGTRLEIK

SEQ ID NO: 6901 - protein, 95 aa, Homo sapiens
EIVLTQSPATLSLSPGERATLSCRASQSVSKFLAWYQQKPGQAPRLLIYDASNRATGIPARFSGSGSGTDFTLTISSLEPEDFAVYYCQQRSNWP

SEQ ID NO: 6902 - protein, 108 aa, Homo sapiens
EIVLTQSPATLSLSPGERATLSCRASQSVSKFLAWYQQKPGQAPRLLIYDASNRATGIPARFSGSGSGTDFTLTISSLEPEDFAVYYCQQRSNWPALTFGGGTKVEIK

SEQ ID NO: 6903 - protein, 96 aa, Homo sapiens
EIVLTQSPATLSLSPGERATLSCRASQSVSNFLAWYQQKPGRAPRLLIYDASNRATGIPARFSGSGSGTDFTLTISSLEPEDFAVYYCQQRSNWPP

SEQ ID NO: 6904 - protein, 108 aa, Homo sapiens
EIVLTQSPATLSLSPGERATLSCRASQSVSNFLAWYQQKPGRAPRLLIYDASNRATGIPARFSGSGSGTDFTLTISSLEPEDFAVYYCQQRSNWPPLTFGGGTKVEIK

SEQ ID NO: 6905 - protein, 96 aa, Homo sapiens
EIVLTQSPATLSLSPGERATLSCRASQSVSNSLAWYQQKPGQAPRLLIYGASNRATGIPARFSGSGSGTDFTLTISSLEPEDSAVYYCQQRSNWPP

SEQ ID NO: 6906 - protein, 109 aa, Homo sapiens
EIVLTQSPATLSLSPGERATLSCRASQSVSNSLAWYQQKPGQAPRLLIYGASNRATGIPARFSGSGSGTDFTLTISSLEPEDSAVYYCQQRSNWPPVITFGPGTKVDIK

SEQ ID NO: 6907 - protein, 96 aa, Homo sapiens
EIVLTQSPATLSLSPGERATLSCRASQSVSNSLAWYQQKPGQSPRLLIYGTSNRATGVPARFSGSGSGPDFTLTISSLEPEDFAVYYCQQRSNWPP

SEQ ID NO: 6908 - protein, 109 aa, Homo sapiens
EIVLTQSPATLSLSPGERATLSCRASQSVSNSLAWYQQKPGQSPRLLIYGTSNRATGVPARFSGSGSGPDFTLTISSLEPEDFAVYYCQQRSNWPPEYTFGQGTKLEIK

SEQ ID NO: 6909 - protein, 96 aa, Homo sapiens
EIVLTQSPATLSLSPGERATLSCRASQSVSNYLAWYQQKPGQAPRLLIYDASNRATGIPARFSGSGSGTDFTLTISSLEPEDFAVYYCQQRSNWPP

SEQ ID NO: 6910 - protein, 108 aa, Homo sapiens
EIVLTQSPATLSLSPGERATLSCRASQSVSNYLAWYQQKPGQAPRLLIYDASNRATGIPARFSGSGSGTDFTLTISSLEPEDFAVYYCQQRSNWPPLTFGGGTKVEIK

SEQ ID NO: 6911 - protein, 95 aa, Homo sapiens
EIVLTQSPATLSLSPGERATLSCRASQSVSRFLAWYQQKPGQAPRLLIYEASNRATGIPARFSGSGSGTDFTLTISSLEPEDFAVYYCQQRSKWP

SEQ ID NO: 6912 - protein, 108 aa, Homo sapiens
EIVLTQSPATLSLSPGERATLSCRASQSVSRFLAWYQQKPGQAPRLLIYEASNRATGIPARFSGSGSGTDFTLTISSLEPEDFAVYYCQQRSKWPGITFGQGTRLEIK

SEQ ID NO: 6913 - protein, 94 aa, Homo sapiens
EIVLTQSPATLSLSPGERATLSCRASQSVSRYLAWYQQKPGQAPRLLIYDASNRATGIPARFSGSGSGTDFTLTISSLEPEDFAVYYCQQRGNW

SEQ ID NO: 6914 - protein, 107 aa, Homo sapiens
EIVLTQSPATLSLSPGERATLSCRASQSVSRYLAWYQQKPGQAPRLLIYDASNRATGIPARFSGSGSGTDFTLTISSLEPEDFAVYYCQQRGNWLWTFGQGTKVEIK

SEQ ID NO: 6915 - protein, 96 aa, Homo sapiens
EIVLTQSPATLSLSPGERATLSCRASQSVSSDLAWYQQKPGQAPRLLIYDAINRATGIPARFSGSGSGTDFTLTISSLEPEDFAVYYCQQRFNWPP

SEQ ID NO: 6916 - protein, 108 aa, Homo sapiens
EIVLTQSPATLSLSPGERATLSCRASQSVSSDLAWYQQKPGQAPRLLIYDAINRATGIPARFSGSGSGTDFTLTISSLEPEDFAVYYCQQRFNWPPITFGQGTRLEIK

SEQ ID NO: 6917 - protein, 96 aa, Homo sapiens
EIVLTQSPATLSLSPGERATLSCRASQSVSSFLAWYQQKPGQAPRLLIYDASNRATGIPARFSGSGSGTDFTLTISSLEPEDFAVYYCQQRSNWPP

SEQ ID NO: 6918 - protein, 108 aa, Homo sapiens
EIVLTQSPATLSLSPGERATLSCRASQSVSSFLAWYQQKPGQAPRLLIYDASNRATGIPARFSGSGSGTDFTLTISSLEPEDFAVYYCQQRSNWPPITFGQGTRLEIK

SEQ ID NO: 6919 - protein, 108 aa, Homo sapiens
EIVLTQSPATLSLSPGERATLSCRASQSVSSFLAWYQQKPGQAPRLLIYDASNRATGIPARFSGSGSGTDFTLTISSLEPEDFAVYYCQQRSNWPPLTFGGGTKVEIK

SEQ ID NO: 6920 - protein, 108 aa, Homo sapiens
EIVLTQSPATLSLSPGERATLSCRASQSVSSFLAWYQQKPGQAPRLLIYDASNRATGIPARFSGSGSGTDFTLTISSLEPEDFAVYYCQQRSNWPPVTFGQGTRLEIK

SEQ ID NO: 6921 - protein, 96 aa, Homo sapiens
EIVLTQSPATLSLSPGERATLSCRASQSVSSNLAWYQQKPGQAPRLLIYGASTRATGIPARFSGSGSGTDFTLTISSLEPEDFAIYYCQQRSNWPP

SEQ ID NO: 6922 - protein, 109 aa, Homo sapiens
EIVLTQSPATLSLSPGERATLSCRASQSVSSNLAWYQQKPGQAPRLLIYGASTRATGIPARFSGSGSGTDFTLTISSLEPEDFAIYYCQQRSNWPPEYTFGQGTKLEIK

SEQ ID NO: 6923 - protein, 97 aa, Homo sapiens
EIVLTQSPATLSLSPGERATLSCRASQSVSSSYLAWYQQRPGQAPRLLIYDASSRAAGIPDRFSGSGSGTDFTLTISRLEPEDFAVYYCQQYGSSPP

SEQ ID NO: 6924 - protein, 109 aa, Homo sapiens
EIVLTQSPATLSLSPGERATLSCRASQSVSSSYLAWYQQRPGQAPRLLIYDASSRAAGIPDRFSGSGSGTDFTLTISRLEPEDFAVYYCQQYGSSPPWTFGQGTKVEIK

SEQ ID NO: 6925 - protein, 96 aa, Homo sapiens
EIVLTQSPATLSLSPGERATLSCRASQSVSSYLAWFQQKPGQAPRLLIYDASNRATGIPARFSGSGSGTDFTLTISSLEPEDFAVYYCQQRSNWPP

SEQ ID NO: 6926 - protein, 108 aa, Homo sapiens
EIVLTQSPATLSLSPGERATLSCRASQSVSSYLAWFQQKPGQAPRLLIYDASNRATGIPARFSGSGSGTDFTLTISSLEPEDFAVYYCQQRSNWPPITFGQGTRLEIK

SEQ ID NO: 6927 - protein, 94 aa, Homo sapiens
EIVLTQSPATLSLSPGERATLSCRASQSVSSYLAWYQQKPGQAPRLLIHDASNRATGIPARFSGSGSGTDFTLTISSLEPEDFAVYYCQQRSNW

SEQ ID NO: 6928 - protein, 107 aa, Homo sapiens
EIVLTQSPATLSLSPGERATLSCRASQSVSSYLAWYQQKPGQAPRLLIHDASNRATGIPARFSGSGSGTDFTLTISSLEPEDFAVYYCQQRSNWSWTFGQGTKVEIK

SEQ ID NO: 6929 - protein, 96 aa, Homo sapiens
EIVLTQSPATLSLSPGERATLSCRASQSVSSYLAWYQQKPGQAPRLLIYDASKRATGIPARFSGSGSGTDFTLIINSLEPEDFAVYYCQQRSNWPP

SEQ ID NO: 6930 - protein, 109 aa, Homo sapiens
EIVLTQSPATLSLSPGERATLSCRASQSVSSYLAWYQQKPGQAPRLLIYDASKRATGIPARFSGSGSGTDFTLIINSLEPEDFAVYYCQQRSNWPPMYSFGQGTKLEIK

SEQ ID NO: 6931 - protein, 96 aa, Homo sapiens
EIVLTQSPATLSLSPGERATLSCRASQSVSSYLAWYQQKPGQAPRLLIYDASKRATGIPARFSGSGSGTDFTLTISGLESEDFAVYYCQQRSNWPP

SEQ ID NO: 6932 - protein, 108 aa, Homo sapiens
EIVLTQSPATLSLSPGERATLSCRASQSVSSYLAWYQQKPGQAPRLLIYDASKRATGIPARFSGSGSGTDFTLTISGLESEDFAVYYCQQRSNWPPITFGQGTRLEIK

SEQ ID NO: 6933 - protein, 96 aa, Homo sapiens
EIVLTQSPATLSLSPGERATLSCRASQSVSSYLAWYQQKPGQAPRLLIYDASNRASGIPARFSGSGSGTDFTLTISSLEPEDFAVYYCQQRSNWPP

SEQ ID NO: 6934 - protein, 108 aa, Homo sapiens
EIVLTQSPATLSLSPGERATLSCRASQSVSSYLAWYQQKPGQAPRLLIYDASNRASGIPARFSGSGSGTDFTLTISSLEPEDFAVYYCQQRSNWPPITFGQGTRLEIK

SEQ ID NO: 6935 - protein, 96 aa, Homo sapiens
EIVLTQSPATLSLSPGERATLSCRASQSVSSYLAWYQQKPGQAPRLLIYDASNRATGIPARFSGSGSGTDFTLTISGLESEDFAVYYCQQRSNWPP

SEQ ID NO: 6936 - protein, 108 aa, Homo sapiens
EIVLTQSPATLSLSPGERATLSCRASQSVSSYLAWYQQKPGQAPRLLIYDASNRATGIPARFSGSGSGTDFTLTISGLESEDFAVYYCQQRSNWPPITFGQGTRLEIK

SEQ ID NO: 6937 - protein, 96 aa, Homo sapiens
EIVLTQSPATLSLSPGERATLSCRASQSVSSYLAWYQQKPGQAPRLLIYDASNRATGIPARFSGSGSGTDFTLTISSLEPEDFAIYYCQQRSHWPP

SEQ ID NO: 6938 - protein, 108 aa, Homo sapiens
EIVLTQSPATLSLSPGERATLSCRASQSVSSYLAWYQQKPGQAPRLLIYDASNRATGIPARFSGSGSGTDFTLTISSLEPEDFAIYYCQQRSHWPPRFTFGQGTKLEI

SEQ ID NO: 6939 - protein, 94 aa, Homo sapiens
EIVLTQSPATLSLSPGERATLSCRASQSVSSYLAWYQQKPGQAPRLLIYDASNRATGIPARFSGSGSGTDFTLTISSLEPEDFAVYYCQQRIKR

SEQ ID NO: 6940 - protein, 108 aa, Homo sapiens
EIVLTQSPATLSLSPGERATLSCRASQSVSSYLAWYQQKPGQAPRLLIYDASNRATGIPARFSGSGSGTDFTLTISSLEPEDFAVYYCQQRIKRRVLTFGGGTKVEIK

SEQ ID NO: 6941 - protein, 92 aa, Homo sapiens
EIVLTQSPATLSLSPGERATLSCRASQSVSSYLAWYQQKPGQAPRLLIYDASNRATGIPARFSGSGSGTDFTLTISSLEPEDFAVYYCQQRS

SEQ ID NO: 6942 - protein, 92 aa, Homo sapiens; identical to SEQ ID NO: 6941

SEQ ID NO: 6943 - protein, 106 aa, Homo sapiens
EIVLTQSPATLSLSPGERATLSCRASQSVSSYLAWYQQKPGQAPRLLIYDASNRATGIPARFSGSGSGTDFTLTISSLEPEDFAVYYCQQRSIMITFGQGTRLEIK

SEQ ID NO: 6944 - protein, 93 aa, Homo sapiens
EIVLTQSPATLSLSPGERATLSCRASQSVSSYLAWYQQKPGQAPRLLIYDASNRATGIPARFSGSGSGTDFTLTISSLEPEDFAVYYCQQRSN

SEQ ID NO: 6945 - protein, 106 aa, Homo sapiens
EIVLTQSPATLSLSPGERATLSCRASQSVSSYLAWYQQKPGQAPRLLIYDASNRATGIPARFSGSGSGTDFTLTISSLEPEDFAVYYCQQRSNLRTFGQGTKVEIK

SEQ ID NO: 6946 - protein, 94 aa, Homo sapiens
EIVLTQSPATLSLSPGERATLSCRASQSVSSYLAWYQQKPGQAPRLLIYDASNRATGIPARFSGSGSGTDFTLTISSLEPEDFAVYYCQQRSNW

SEQ ID NO: 6947 - protein, 106 aa, Homo sapiens
EIVLTQSPATLSLSPGERATLSCRASQSVSSYLAWYQQKPGQAPRLLIYDASNRATGIPARFSGSGSGTDFTLTISSLEPEDFAVYYCQQRSNWITFGQGTRLEIK

SEQ ID NO: 6948 - protein, 107 aa, Homo sapiens
EIVLTQSPATLSLSPGERATLSCRASQSVSSYLAWYQQKPGQAPRLLIYDASNRATGIPARFSGSGSGTDFTLTISSLEPEDFAVYYCQQRSNWLLTFGGGTKVEIK

SEQ ID NO: 6949 - protein, 106 aa, Homo sapiens
EIVLTQSPATLSLSPGERATLSCRASQSVSSYLAWYQQKPGQAPRLLIYDASNRATGIPARFSGSGSGTDFTLTISSLEPEDFAVYYCQQRSNWLTFGGGTKVEIK

SEQ ID NO: 6950 - protein, 95 aa, Homo sapiens
EIVLTQSPATLSLSPGERATLSCRASQSVSSYLAWYQQKPGQAPRLLIYDASNRATGIPARFSGSGSGTDFTLTISSLEPEDFAVYYCQQRSNWP

SEQ ID NO: 6951 - protein, 107 aa, Homo sapiens
EIVLTQSPATLSLSPGERATLSCRASQSVSSYLAWYQQKPGQAPRLLIYDASNRATGIPARFSGSGSGTDFTLTISSLEPEDFAVYYCQQRSNWPLTFGQGTKVEIK

SEQ ID NO: 6952 - protein, 96 aa, Homo sapiens
EIVLTQSPATLSLSPGERATLSCRASQSVSSYLAWYQQKPGQAPRLLIYDASNRATGIPARFSGSGSGTDFTLTISSLEPEDFAVYYCQQRSNWPP

SEQ ID NO: 6953 - protein, 109 aa, Homo sapiens
EIVLTQSPATLSLSPGERATLSCRASQSVSSYLAWYQQKPGQAPRLLIYDASNRATGIPARFSGSGSGTDFTLTISSLEPEDFAVYYCQQRSNWPPGGTFGQGTKVEIK

SEQ ID NO: 6954 - protein, 109 aa, Homo sapiens
EIVLTQSPATLSLSPGERATLSCRASQSVSSYLAWYQQKPGQAPRLLIYDASNRATGIPARFSGSGSGTDFTLTISSLEPEDFAVYYCQQRSNWPPGITFGPGTKVDIK

SEQ ID NO: 6955 - protein, 109 aa, Homo sapiens
EIVLTQSPATLSLSPGERATLSCRASQSVSSYLAWYQQKPGQAPRLLIYDASNRATGIPARFSGSGSGTDFTLTISSLEPEDFAVYYCQQRSNWPPGLTFGGGTKVEIK

SEQ ID NO: 6956 - protein, 108 aa, Homo sapiens
EIVLTQSPATLSLSPGERATLSCRASQSVSSYLAWYQQKPGQAPRLLIYDASNRATGIPARFSGSGSGTDFTLTISSLEPEDFAVYYCQQRSNWPPITFGGGTKVEIK

SEQ ID NO: 6957 - protein, 108 aa, Homo sapiens
EIVLTQSPATLSLSPGERATLSCRASQSVSSYLAWYQQKPGQAPRLLIYDASNRATGIPARFSGSGSGTDFTLTISSLEPEDFAVYYCQQRSNWPPITFGQGTRLEIK

SEQ ID NO: 6958 - protein, 109 aa, Homo sapiens
EIVLTQSPATLSLSPGERATLSCRASQSVSSYLAWYQQKPGQAPRLLIYDASNRATGIPARFSGSGSGTDFTLTISSLEPEDFAVYYCQQRSNWPPLFTFGPGTKVDIK

SEQ ID NO: 6959 - protein, 108 aa, Homo sapiens [sequence omitted]

SEQ ID NO: 6960 - protein, 110 aa, Homo sapiens
EIVLTQSPATLSLSPGERATLSCRASQSVSSYLAWYQQKPGQAPRLLIYDASNRATGIPARFSGSGSGTDFTLTISSLEPEDFAVYYCQQRSNWPPSVYTFGQGTKLEIK

SEQ ID NO: 6961 - protein, 107 aa, Homo sapiens
EIVLTQSPATLSLSPGERATLSCRASQSVSSYLAWYQQKPGQAPRLLIYDASNRATGIPARFSGSGSGTDFTLTISSLEPEDFAVYYCQQRSNWPPTFGGGTKVEIK

SEQ ID NO: 6962 - protein, 108 aa, Homo sapiens
EIVLTQSPATLSLSPGERATLSCRASQSVSSYLAWYQQKPGQAPRLLIYDASNRATGIPARFSGSGSGTDFTLTISSLEPEDFAVYYCQQRSNWPSITFGQGTRLEIK

SEQ ID NO: 6963 - protein, 108 aa, Homo sapiens
EIVLTQSPATLSLSPGERATLSCRASQSVSSYLAWYQQKPGQAPRLLIYDASNRATGIPARFSGSGSGTDFTLTISSLEPEDFAVYYCQQRSNWSTWTFGQGTKVEIK

SEQ ID NO: 6964 - protein, 106 aa, Homo sapiens
EIVLTQSPATLSLSPGERATLSCRASQSVSSYLAWYQQKPGQAPRLLIYDASNRATGIPARFSGSGSGTDFTLTISSLEPEDFAVYYCQQRSNWWTFGQGTKVEIK

SEQ ID NO: 6965 - protein, 105 aa, Homo sapiens
EIVLTQSPATLSLSPGERATLSCRASQSVSSYLAWYQQKPGQAPRLLIYDASNRATGIPARFSGSGSGTDFTLTISSLEPEDFAVYYCQQRSSYTFGQGTKLEIK

SEQ ID NO: 6966 - protein, 95 aa, Homo sapiens
EIVLTQSPATLSLSPGERATLSCRASQSVSTYLAWYQQKPGQAPRLLIYDASHRATGIPSRFSGSGSGTDFTLTISSLEPEDFAVYYCHQRGNWP

SEQ ID NO: 6967 - protein, 107 aa, Homo sapiens
EIVLTQSPATLSLSPGERATLSCRASQSVSTYLAWYQQKPGQAPRLLIYDASHRATGIPSRFSGSGSGTDFTLTISSLEPEDFAVYYCHQRGNWPGVTFGGGTKVEI

SEQ ID NO: 6968 - protein, 96 aa, Homo sapiens
EIVLTQSPATLSLSPGERATLSCRASQSVSTYLAWYQQKPGQAPRLLIYDASNRATGIPARFSGSGSGTDFTLTISSLEPEDFAVYYCQQRSNWPP

SEQ ID NO: 6969 - protein, 108 aa, Homo sapiens
EIVLTQSPATLSLSPGERATLSCRASQSVSTYLAWYQQKPGQAPRLLIYDASNRATGIPARFSGSGSGTDFTLTISSLEPEDFAVYYCQQRSNWPPITFGQGTRLEIK

SEQ ID NO: 6970 - protein, 109 aa, Homo sapiens
EIVLTQSPATLSLSPGERATLSCRASQSVSTYLAWYQQKPGQAPRLLIYDASNRATGIPARFSGSGSGTDFTLTISSLEPEDFAVYYCQQRSNWPPKYTFGQGTKLEMK

SEQ ID NO: 6971 - protein, 96 aa, Homo sapiens
EIVLTQSPATLSLSPGERATLSCRASQSVSTYLAWYQQKPGQAPRLLIYDASSRATGIPARFSGSGSGTDFTLTISSLEPEDFAVYYCQQRSNWPP

SEQ ID NO: 6972 - protein, 108 aa, Homo sapiens
EIVLTQSPATLSLSPGERATLSCRASQSVSTYLAWYQQKPGQAPRLLIYDASSRATGIPARFSGSGSGTDFTLTISSLEPEDFAVYYCQQRSNWPPITFGQGTRLEIK

SEQ ID NO: 6973 - protein, 96 aa, Homo sapiens
EIVLTQSPATLSLSPGERATLSCRASQSVSTYLAWYQQKPGQAPRLLMYDASNRATGIPARFSGSGSGTDFTLTISSLEPEDFAVYYCQQRSNWPP

SEQ ID NO: 6974 - protein, 108 aa, Homo sapiens
EIVLTQSPATLSLSPGERATLSCRASQSVSTYLAWYQQKPGQAPRLLMYDASNRATGIPARFSGSGSGTDFTLTISSLEPEDFAVYYCQQRSNWPPITFGQGTRLEIK

SEQ ID NO: 6975 - protein, 96 aa, Homo sapiens
EIVLTQSPATLSLSPGERATLSCRASQTIGDHLAWYQQKPGQAPRLLIYDASNRATGIPARFSGSGFGTDFTLTISSLEPEDFAVYYCQQRYNWPP

SEQ ID NO: 6976 - protein, 108 aa, Homo sapiens
EIVLTQSPATLSLSPGERATLSCRASQTIGDHLAWYQQKPGQAPRLLIYDASNRATGIPARFSGSGFGTDFTLTISSLEPEDFAVYYCQQRYNWPPLTFGGGTKVEIK

SEQ ID NO: 6977 - protein, 95 aa, Homo sapiens
EIVLTQSPATLSLSPGERVTLSCGASQSITTSLAWYQQKPGLAPSLLIYDASKRATGVPDRFRGSGSGTDFTLTISRLEPEDFAVYFCHQYSTSP

SEQ ID NO: 6978 - protein, 107 aa, Homo sapiens
EIVLTQSPATLSLSPGERVTLSCGASQSITTSLAWYQQKPGLAPSLLIYDASKRATGVPDRFRGSGSGTDFTLTISRLEPEDFAVYFCHQYSTSPQTFGPGTKVDLK

SEQ ID NO: 6979 - protein, 96 aa, Homo sapiens
EIVLTQSPATLSLSPGERVTLSCRASQSVSSYLAWYQQKPGQAPRLLIYDASNRANGIPARFSGSGSGTDFTLTISSLEPEDFAVYYCQQRRYWPP

SEQ ID NO: 6980 - protein, 108 aa, Homo sapiens
EIVLTQSPATLSLSPGERVTLSCRASQSVSSYLAWYQQKPGQAPRLLIYDASNRANGIPARFSGSGSGTDFTLTISSLEPEDFAVYYCQQRRYWPPLTFGGGTKVEIK

SEQ ID NO: 6981 - protein, 95 aa, Homo sapiens
EIVLTQSPATLSLSPGESATLSCKASQSVSKFLAWFQQKPGQAPRLLIYDASNRASGTPARFSGSGSGTDFTLTISGLEPEDFAVYYCQQRSNWP

SEQ ID NO: 6982 - protein, 108 aa, Homo sapiens
EIVLTQSPATLSLSPGESATLSCKASQSVSKFLAWFQQKPGQAPRLLIYDASNRASGTPARFSGSGSGTDFTLTISGLEPEDFAVYYCQQRSNWPSLTFGGGTKVEIK

SEQ ID NO: 6983 - protein, 95 aa, Homo sapiens
EIVLTQSPATLSLSPGESATLSCRASQSVRKFLAWYQQKPGQAPRLLIYDASNRATGIPARFRGTGSGTDFTLTISSLEPEDFAVYYCQERSTWP

SEQ ID NO: 6984 - protein, 108 aa, Homo sapiens
EIVLTQSPATLSLSPGESATLSCRASQSVRKFLAWYQQKPGQAPRLLIYDASNRATGIPARFRGTGSGTDFTLTISSLEPEDFAVYYCQERSTWPQLTFGGGTKVEIK

SEQ ID NO: 6985 - protein, 95 aa, Homo sapiens
EIVLTQSPATLSVSPGEGATLSCRASQSVARNFAWYQQKPGQAPRLLIYGISTTAAGIPARFSGSGSGTEFTLTISSVQSEDFAVYFCQQYNYWP

SEQ ID NO: 6986 - protein, 106 aa, Homo sapiens
EIVLTQSPATLSVSPGEGATLSCRASQSVARNFAWYQQKPGQAPRLLIYGISTTAAGIPARFSGSGSGTEFTLTISSVQSEDFAVYFCQQYNYWPLTFGGGTKVEI

SEQ ID NO: 6987 - protein, 94 aa, Homo sapiens
EIVLTQSPATLSVSPGERATLSCKASQSVSTNLAWYQQKPGQVPRLLIYGASTRATGISARFSGSGSGTDFTLTISSLQSEDFAVYYCQQYNNW

SEQ ID NO: 6988 - protein, 108 aa, Homo sapiens
EIVLTQSPATLSVSPGERATLSCKASQSVSTNLAWYQQKPGQVPRLLIYGASTRATGISARFSGSGSGTDFTLTISSLQSEDFAVYYCQQYNNWSALTFGGGTKVEIK

SEQ ID NO: 6989 - protein, 95 aa, Homo sapiens
EIVLTQSPATLSVSPGERATLSCRASQSISSSLAWYQQKPGQPPRLLIYGASTRATGIPARFSGSGSGTEFTLSISSMQSEDFALYFCQQYDNRP

SEQ ID NO: 6990 - protein, 107 aa, Homo sapiens
EIVLTQSPATLSVSPGERATLSCRASQSISSSLAWYQQKPGQPPRLLIYGASTRATGIPARFSGSGSGTEFTLSISSMQSEDFALYFCQQYDNRPLTFGGGTKVDIK

SEQ ID NO: 6991 - protein, 96 aa, Homo sapiens
EIVLTQSPATLSVSPGERATLSCRASQSVGSNLAWYQHRPGQTPRLLIFGASTRATGIPGRFTGSGSGTEFTLTITSMQSEDFAVYYCQQYHNWPP

SEQ ID NO: 6992 - protein, 108 aa, Homo sapiens
EIVLTQSPATLSVSPGERATLSCRASQSVGSNLAWYQHRPGQTPRLLIFGASTRATGIPGRFTGSGSGTEFTLTITSMQSEDFAVYYCQQYHNWPPLTFGGGTKVEIK

SEQ ID NO: 6993 - protein, 93 aa, Homo sapiens
EIVLTQSPATLSVSPGERATLSCRASQSVSNNLAWCQQKPGQSPRVLIYGASTRATGIPARFSGSGSGTEFTLTINNMQSEDFAVYYCHQYDD

SEQ ID NO: 6994 - protein, 106 aa, Homo sapiens
EIVLTQSPATLSVSPGERATLSCRASQSVSNNLAWCQQKPGQSPRVLIYGASTRATGIPARFSGSGSGTEFTLTINNMQSEDFAVYYCHQYDDPWTFGQGTKVEIK

SEQ ID NO: 6995 - protein, 96 aa, Homo sapiens
EIVLTQSPATLSVSPGERATLSCRASQSVSSDLAWYQQKPGQSPRLLIYGASTRATGIPARFSGSGSGTEFTLTISSLQSEDFAVYYCQQYNNWPP

SEQ ID NO: 6996 - protein, 108 aa, Homo sapiens
EIVLTQSPATLSVSPGERATLSCRASQSVSSDLAWYQQKPGQSPRLLIYGASTRATGIPARFSGSGSGTEFTLTISSLQSEDFAVYYCQQYNNWPPLTFGGGTKVEIK

SEQ ID NO: 6997 - protein, 96 aa, Homo sapiens
EIVLTQSPATLSVSPGERATLSCRASQSVSSDLAWYQQRPGQAPRLVMYGASTRATGIPARFSGSGSGTEFTLTISSLQSEDFAVYYCQQYNNWPP

SEQ ID NO: 6998 - protein, 108 aa, Homo sapiens
EIVLTQSPATLSVSPGERATLSCRASQSVSSDLAWYQQRPGQAPRLVMYGASTRATGIPARFSGSGSGTEFTLTISSLQSEDFAVYYCQQYNNWPPLTFGGGTKVEIK

SEQ ID NO: 6999 - protein, 95 aa, Homo sapiens
EIVLTQSPATLSVSPGERVTLSCRASQSISSSLAWYQQKPGQAPRLLIYGASTRATGIPARFSGSGSGTEFTLTISSMQSEDFAVYYCQQYDNRP

SEQ ID NO: 7000 - protein, 107 aa, Homo sapiens
EIVLTQSPATLSVSPGERVTLSCRASQSISSSLAWYQQKPGQAPRLLIYGASTRATGIPARFSGSGSGTEFTLTISSMQSEDFAVYYCQQYDNRPLTFGGGTKVEIK

SEQ ID NO: 7001 - protein, 94 aa, Homo sapiens
EIVLTQSPATLSVSPGERVTLSCRASQSVSSNLAWYQQKPGQAPRLLIYAASTRATGIPAKFSGSGSGTEFTLTISSLQPEDFAVYYCQQYANW

SEQ ID NO: 7002 - protein, 106 aa, Homo sapiens
EIVLTQSPATLSVSPGERVTLSCRASQSVSSNLAWYQQKPGQAPRLLIYAASTRATGIPAKFSGSGSGTEFTLTISSLQPEDFAVYYCQQYANWLNSFGQGTKLEI

SEQ ID NO: 7003 - protein, 95 aa, Homo sapiens
EIVLTQSPDFQSVTPKEKVTITCRASQSIGSSLHWYQQKPDQSPKLLIKYASQSFSGVPSRFSGSGSGTDFTLTINSLEAEDAATYYCHQSSSFP

SEQ ID NO: 7004 - protein, 107 aa, Homo sapiens
EIVLTQSPDFQSVTPKEKVTITCRASQSIGSSLHWYQQKPDQSPKLLIKYASQSFSGVPSRFSGSGSGTDFTLTINSLEAEDAATYYCHQSSSFPLTFGGGTKVEIK

SEQ ID NO: 7005 - protein, 95 aa, Homo sapiens
EIVLTQSPDFQSVTPKEKVTLTCRASQSIGSSLHWYQQKPDQSPKLLIKYASQSISGVPSRFSGSGSGTDFTLTITSLEAEDAATYYCHQSSSLP

SEQ ID NO: 7006 - protein, 107 aa, Homo sapiens
EIVLTQSPDFQSVTPKEKVTLTCRASQSIGSSLHWYQQKPDQSPKLLIKYASQSISGVPSRFSGSGSGTDFTLTITSLEAEDAATYYCHQSSSLPWTFGQGTKVEIK

SEQ ID NO: 7007 - protein, 94 aa, Homo sapiens
EIVLTQSPDTLSLSPGDRATLSCRASQSISSYLAWYQQKPGQAPRLLIYGASNRATGIPDRFSGSGSGTDFTLTISRLEPEDCAVYYCQHYGSS

SEQ ID NO: 7008 - protein, 107 aa, Homo sapiens
EIVLTQSPDTLSLSPGDRATLSCRASQSISSYLAWYQQKPGQAPRLLIYGASNRATGIPDRFSGSGSGTDFTLTISRLEPEDCAVYYCQHYGSSLRAFGQGTKVEIK

SEQ ID NO: 7009 - protein, 97 aa, Homo sapiens
EIVLTQSPDTLSLSPGERATLSCRASQSISRSDLAWYQQKPGLAPRLLIYDASSRATGVPDRFSGSGSGTDFTLTITRLEPDDFAVYYCQQYGSSPP

SEQ ID NO: 7010 - protein, 108 aa, Homo sapiens
EIVLTQSPDTLSLSPGERATLSCRASQSISRSDLAWYQQKPGLAPRLLIYDASSRATGVPDRFSGSGSGTDFTLTITRLEPDDFAVYYCQQYGSSPPTFGQGTKVEIK

SEQ ID NO: 7011 - protein, 95 aa, Homo sapiens
EIVLTQSPDTLSLSPGESATLFCRASQSVRSSYLAWYQQTPGQAPRLLIYGASSRATGIPDRFSGSGSGTDFTLTISRLEPEDFAVYYCQQFGRS

SEQ ID NO: 7012 - protein, 108 aa, Homo sapiens
EIVLTQSPDTLSLSPGESATLFCRASQSVRSSYLAWYQQTPGQAPRLLIYGASSRATGIPDRFSGSGSGTDFTLTISRLEPEDFAVYYCQQFGRSSWTFGQGTKVEIK

SEQ ID NO: 7013 - protein, 96 aa, Homo sapiens
EIVLTQSPDTLSSSPGERVTLSCRPSQDMSTNSLAWYQQKPGQAPRLLLFGTHIRASGIPDRFTGSGSGTDFTLTISRLEPEDFAVYYCQQCAYSP

SEQ ID NO: 7014 - protein, 107 aa, Homo sapiens
EIVLTQSPDTLSSSPGERVTLSCRPSQDMSTNSLAWYQQKPGQAPRLLLFGTHIRASGIPDRFTGSGSGTDFTLTISRLEPEDFAVYYCQQCAYSPRTFGQGTKVEI

SEQ ID NO: 7015 - protein, 96 aa, Homo sapiens
EIVLTQSPGALSLSPGERATLSCRASQSVSSNYLAWYQQKPGQAPRLLIYGASSRATGIPDRFSGSGSGTDFTLTITRLEPEDFAVYYCQQYGSSP

SEQ ID NO: 7016 - protein, 108 aa, Homo sapiens
EIVLTQSPGALSLSPGERATLSCRASQSVSSNYLAWYQQKPGQAPRLLIYGASSRATGIPDRFSGSGSGTDFTLTITRLEPEDFAVYYCQQYGSSPLTFGGGTKVEIK

SEQ ID NO: 7017 - protein, 96 aa, Homo sapiens
EIVLTQSPGILSLSPGERATLSCRARQSVSSNYLAWYQQKPGQAPRLLIYDASSRATGISDRFSGSGSGTDFTLTISRLEPEDFAVYYCQQYGNSP

SEQ ID NO: 7018 - protein, 107 aa, Homo sapiens
EIVLTQSPGILSLSPGERATLSCRARQSVSSNYLAWYQQKPGQAPRLLIYDASSRATGISDRFSGSGSGTDFTLTISRLEPEDFAVYYCQQYGNSPTFGQGTKVEIK

SEQ ID NO: 7019 - protein, 96 aa, Homo sapiens
EIVLTQSPGSLSLSPGERATLSCRASQSVKSNSLAWYQQKPGQAPRLLLYGSSSRATGIPDRFGGSGSGTDFTLIISGLESEDFAVYYCQQYGSSP

SEQ ID NO: 7020 - protein, 108 aa, Homo sapiens
EIVLTQSPGSLSLSPGERATLSCRASQSVKSNSLAWYQQKPGQAPRLLLYGSSSRATGIPDRFGGSGSGTDFTLIISGLESEDFAVYYCQQYGSSPFTFGQGTKLEIK

SEQ ID NO: 7021 - protein, 97 aa, Homo sapiens
EIVLTQSPGTLCLSPGERATLSCRASQSVASSYLAWYQQKPGQAPRLLIYGASSRATGIPDRFSGSGSGTDFTLTISRLEPEDFAVYSCQQYGSSPP

SEQ ID NO: 7022 - protein, 108 aa, Homo sapiens
EIVLTQSPGTLCLSPGERATLSCRASQSVASSYLAWYQQKPGQAPRLLIYGASSRATGIPDRFSGSGSGTDFTLTISRLEPEDFAVYSCQQYGSSPPTFGQGTKVEIK

SEQ ID NO: 7023 - protein, 96 aa, Homo sapiens
EIVLTQSPGTLFSSPGERVTLSCRASQSVTSNYLAWYQQKRGQAPRLLISGASSRATGIPDRFSGSGSGTHFTLTISELEPEDFAVYYCQQYATSP

SEQ ID NO: 7024 - protein, 108 aa, Homo sapiens
EIVLTQSPGTLFSSPGERVTLSCRASQSVTSNYLAWYQQKRGQAPRLLISGASSRATGIPDRFSGSGSGTHFTLTISELEPEDFAVYYCQQYATSPRAFGQGTKVGMK

SEQ ID NO: 7025 - protein, 97 aa, Homo sapiens
EIVLTQSPGTLPLSPGERATLSCRASQSVSSNYLAWYQQKPGQAPRLLIYGASSRATGIPDRFSGSASGTDFTLTISRLEPEDFAVYYCQQYSGSPP

SEQ ID NO: 7026 - protein, 107 aa, Homo sapiens
EIVLTQSPGTLPLSPGERATLSCRASQSVSSNYLAWYQQKPGQAPRLLIYGASSRATGIPDRFSGSASGTDFTLTISRLEPEDFAVYYCQQYSGSPPTFGGGTKVEI

SEQ ID NO: 7027 - protein, 96 aa, Homo sapiens
EIVLTQSPGTLSLSAGARATLSCRASQSIKSNNLAWYQQKPGQTPRLLIYGASSRASGIPDRFSGSGSGTDYTLTISRLEPEDFAVYYCQQYGSSP

SEQ ID NO: 7028 - protein, 107 aa, Homo sapiens
EIVLTQSPGTLSLSAGARATLSCRASQSIKSNNLAWYQQKPGQTPRLLIYGASSRASGIPDRFSGSGSGTDYTLTISRLEPEDFAVYYCQQYGSSPGTFGQGTKVDI

SEQ ID NO: 7029 - protein, 96 aa, Homo sapiens
EIVLTQSPGTLSLSPGAKATLSCRASQRIGSNNLAWYQQGIGQPPRLLIYAASSRATGIPDRFSGSGSGTDFTLTISRLEPEDFAVYYCQQYDSSP

SEQ ID NO: 7030 - protein, 105 aa, Homo sapiens
EIVLTQSPGTLSLSPGAKATLSCRASQRIGSNNLAWYQQGIGQPPRLLIYAASSRATGIPDRFSGSGSGTDFTLTISRLEPEDFAVYYCQQYDSSPATFGQGTKV

SEQ ID NO: 7031 - protein, 96 aa, Homo sapiens
EIVLTQSPGTLSLSPGARATLSCRASQSLGSSSLAWYQQKPGQSPRLLIYGASTRATGIPGRFTGSGSGTDYTLTISRVEPEDFAMYYCQQYDVSP

SEQ ID NO: 7032 - protein, 108 aa, Homo sapiens
EIVLTQSPGTLSLSPGARATLSCRASQSLGSSSLAWYQQKPGQSPRLLIYGASTRATGIPGRFTGSGSGTDYTLTISRVEPEDFAMYYCQQYDVSPGTFGQGTKVDIK

SEQ ID NO: 7033 - protein, 92 aa, Homo sapiens
EIVLTQSPGTLSLSPGARATLSCRASQSLRSGSLAWYQQKPGQSPRLLIHGASSRATGIPDRFTGSGSGTDYTLTISRLEPEDFAMYYCQQY

SEQ ID NO: 7034 - protein, 108 aa, Homo sapiens
EIVLTQSPGTLSLSPGARATLSCRASQSLRSGSLAWYQQKPGQSPRLLIHGASSRATGIPDRFTGSGSGTDYTLTISRLEPEDFAMYYCQQYDMSPATFGQGTKVEIK

SEQ ID NO: 7035 - protein, 96 aa, Homo sapiens
EIVLTQSPGTLSLSPGARATLSCRASQSLRSNSLAWYQQKPGQSPRLLIYGASSRATGVPGRFTGSGSGTDYTLTITRLEPEDFAVYYCQQYDISP

SEQ ID NO: 7036 - protein, 108 aa, Homo sapiens
EIVLTQSPGTLSLSPGARATLSCRASQSLRSNSLAWYQQKPGQSPRLLIYGASSRATGVPGRFTGSGSGTDYTLTITRLEPEDFAVYYCQQYDISPGTFGQGTKVEIK

SEQ ID NO: 7037 - protein, 96 aa, Homo sapiens
EIVLTQSPGTLSLSPGARATLSCRASQSVRSNSLAWYQQRPGQSPRLLIYGASSRATGIPDRFSGSGSGTDYTLTISRLEPEDFAMYYCQQYGSSP

SEQ ID NO: 7038 - protein, 107 aa, Homo sapiens
EIVLTQSPGTLSLSPGARATLSCRASQSVRSNSLAWYQQRPGQSPRLLIYGASSRATGIPDRFSGSGSGTDYTLTISRLEPEDFAMYYCQQYGSSPGTFGQGTKVDI

SEQ ID NO: 7039 - protein, 96 aa, Homo sapiens
EIVLTQSPGTLSLSPGDRATLSCRASQIQTYSNIAWYQHKPGQAPRLLIYGASGRAPGTPDRFSGRGSGPDFTLTISRLEPEDFAVYYCQEYGSSP

SEQ ID NO: 7040 - protein, 108 aa, Homo sapiens
EIVLTQSPGTLSLSPGDRATLSCRASQIQTYSNIAWYQHKPGQAPRLLIYGASGRAPGTPDRFSGRGSGPDFTLTISRLEPEDFAVYYCQEYGSSPRFTFGPGTKVDF

SEQ ID NO: 7041 - protein, 96 aa, Homo sapiens
EIVLTQSPGTLSLSPGDRATLSCRASQNLSSGYVAWYQQKSGQAPRLLIYAASSRATGIPDRFSGSGSGTDFTLTISRLEPEDFAVYYCQQYGSSP

SEQ ID NO: 7042 - protein, 108 aa, Homo sapiens
EIVLTQSPGTLSLSPGDRATLSCRASQNLSSGYVAWYQQKSGQAPRLLIYAASSRATGIPDRFSGSGSGTDFTLTISRLEPEDFAVYYCQQYGSSPRAFGQGTRLEIK

SEQ ID NO: 7043 - protein, 95 aa, Homo sapiens
EIVLTQSPGTLSLSPGDRATLSCRASQSLTDTFLAWYQQRPGQAPRLLIFGSSTRATGIPDRFSASGSGTDFTLTISRLEPEDFAVYYCQHFSTS

SEQ ID NO: 7044 - protein, 110 aa, Homo sapiens
EIVLTQSPGTLSLSPGDRATLSCRASQSLTDTFLAWYQQRPGQAPRLLIFGSSTRATGIPDRFSASGSGTDFTLTISRLEPEDFAVYYCQHFSTSLRIFTFGPGTKLDVK

SEQ ID NO: 7045 - protein, 96 aa, Homo sapiens
EIVLTQSPGTLSLSPGDRATLSCRASQSVSNNFLAWYQQKPGQAPRFLIYGASSRATGIPDRFSGSGSGTDFTLTISRLESEDFGMYYCQQYGSSP

SEQ ID NO: 7046 - protein, 108 aa, Homo sapiens
EIVLTQSPGTLSLSPGDRATLSCRASQSVSNNFLAWYQQKPGQAPRFLIYGASSRATGIPDRFSGSGSGTDFTLTISRLESEDFGMYYCQQYGSSPVTFGGGTKVEIK

SEQ ID NO: 7047 - protein, 89 aa, Homo sapiens
EIVLTQSPGTLSLSPGEGATLFCRASQSLSSDSLAWYQQKLGQAPRLLIYGASTRATGIPDRFSGSGSGTDFTLTITRLEPEDFAMYYC

SEQ ID NO: 7048 - protein, 105 aa, Homo sapiens
EIVLTQSPGTLSLSPGEGATLFCRASQSLSSDSLAWYQQKLGQAPRLLIYGASTRATGIPDRFSGSGSGTDFTLTITRLEPEDFAMYYCGGSQYTFGQGTKLEIK

SEQ ID NO: 7049 - protein, 96 aa, Homo sapiens
EIVLTQSPGTLSLSPGEGATLSCRASQNIINKYVAWYQQRAGQAPRLLIYDASHRATGIPDRFSGSGSGTDFTLTIRSLEPEDFAVYYCQQYGSSP

SEQ ID NO: 7050 - protein, 108 aa, Homo sapiens
EIVLTQSPGTLSLSPGEGATLSCRASQNIINKYVAWYQQRAGQAPRLLIYDASHRATGIPDRFSGSGSGTDFTLTIRSLEPEDFAVYYCQQYGSSPRTFGQGTKVEIK

SEQ ID NO: 7051 - protein, 96 aa, Homo sapiens
EIVLTQSPGTLSLSPGEGATLSCRASQSIINNFVAWYQQRAGQAPRLLIYDASNRATGIPDRFSGSGSGTDFTLTISSLEPEDFAVYYCQQYGTSP

SEQ ID NO: 7052 - protein, 107 aa, Homo sapiens
EIVLTQSPGTLSLSPGEGATLSCRASQSIINNFVAWYQQRAGQAPRLLIYDASNRATGIPDRFSGSGSGTDFTLTISSLEPEDFAVYYCQQYGTSPRTFGQGTKVEI

SEQ ID NO: 7053 - protein, 96 aa, Homo sapiens
EIVLTQSPGTLSLSPGEGATLSCRASQSVSSSHLAWYQHKPGQAPRLLIYGASSRATGIPDRFSGSGSGTDFTLTISRVEPEDFAMYYCHQYGSSP

SEQ ID NO: 7054 - protein, 108 aa, Homo sapiens
EIVLTQSPGTLSLSPGEGATLSCRASQSVSSSHLAWYQHKPGQAPRLLIYGASSRATGIPDRFSGSGSGTDFTLTISRVEPEDFAMYYCHQYGSSPSTFGQGTKLEIK

SEQ ID NO: 7055 - protein, 95 aa, Homo sapiens
EIVLTQSPGTLSLSPGEGATLSCRASQSVSSSSLAWYQQKPGQAPRLLIYGASTRATGTPARFIGRGSGTEFTLTINRLEPEDFAVYYCQQYDSS

SEQ ID NO: 7056 - protein, 108 aa, Homo sapiens
EIVLTQSPGTLSLSPGEGATLSCRASQSVSSSSLAWYQQKPGQAPRLLIYGASTRATGTPARFIGRGSGTEFTLTINRLEPEDFAVYYCQQYDSSILTFGGGTKVEIQ

SEQ ID NO: 7057 - protein, 96 aa, Homo sapiens
EIVLTQSPGTLSLSPGEGATLSCRASQSVSSSYLAWYQQKPGQAPRLLIYGASSRATGIPDRFSGRGSGTDFTLTITRLEPEDFAVYYCQQYGGSP

SEQ ID NO: 7058 - protein, 108 aa, Homo sapiens
EIVLTQSPGTLSLSPGEGATLSCRASQSVSSSYLAWYQQKPGQAPRLLIYGASSRATGIPDRFSGRGSGTDFTLTITRLEPEDFAVYYCQQYGGSPSTFGQGTRVEIK

SEQ ID NO: 7059 - protein, 96 aa, Homo sapiens
EIVLTQSPGTLSLSPGERAALSCRATETVSDNKLAWYQQKPGQAPRLLIYGASSRATGIPDRFSGSGSGTDFTLTISRLEPEDFAAYYCQQYGRSP

SEQ ID NO: 7060 - protein, 108 aa, Homo sapiens
EIVLTQSPGTLSLSPGERAALSCRATETVSDNKLAWYQQKPGQAPRLLIYGASSRATGIPDRFSGSGSGTDFTLTISRLEPEDFAAYYCQQYGRSPFTFGPGTKVDIK

SEQ ID NO: 7061 - protein, 96 aa, Homo sapiens
EIVLTQSPGTLSLSPGERAILSCRASQSVSSSYLGWYQQKPGQAPRLLIYGTSNRATGIPDRFSGSGSGTDFTLTISRLEPEDFAVYYCQQYGNSP

SEQ ID NO: 7062 - protein, 107 aa, Homo sapiens
EIVLTQSPGTLSLSPGERAILSCRASQSVSSSYLGWYQQKPGQAPRLLIYGTSNRATGIPDRFSGSGSGTDFTLTISRLEPEDFAVYYCQQYGNSPTFGGGTKVEIK

SEQ ID NO: 7063 - protein, 97 aa, Homo sapiens
EIVLTQSPGTLSLSPGERANLSCRASQSVSSSYLAWYQQKPGQAPRLLIYAASSRATGIPDRFSGSGSGTDFALTINRLEPEDFAVYHCQQYGSSPP

SEQ ID NO: 7064 - protein, 109 aa, Homo sapiens
EIVLTQSPGTLSLSPGERANLSCRASQSVSSSYLAWYQQKPGQAPRLLIYAASSRATGIPDRFSGSGSGTDFALTINRLEPEDFAVYHCQQYGSSPPITFGQGTRLEIK

SEQ ID NO: 7065 - protein, 96 aa, Homo sapiens
EIVLTQSPGTLSLSPGERASLSCRASQNVNSNSLAWYQQKPGQAPRLLIYAASSRATGIPDRFSGSGSGTDFTLTISRLEPEDFAVYYCQHYGTSP

SEQ ID NO: 7066 - protein, 108 aa, Homo sapiens
EIVLTQSPGTLSLSPGERASLSCRASQNVNSNSLAWYQQKPGQAPRLLIYAASSRATGIPDRFSGSGSGTDFTLTISRLEPEDFAVYYCQHYGTSPRTFGQGTKVEIK

SEQ ID NO: 7067 - protein, 95 aa, Homo sapiens
EIVLTQSPGTLSLSPGERATFSCRASQSIKNIYSAWYQQKPGQAPRLLIYSTSRRATGIPDRFSGSGSGTDFTLTISRLEPEDFAVYYCQQWINS

SEQ ID NO: 7068 - protein, 107 aa, Homo sapiens
EIVLTQSPGTLSLSPGERATFSCRASQSIKNIYSAWYQQKPGQAPRLLIYSTSRRATGIPDRFSGSGSGTDFTLTISRLEPEDFAVYYCQQWINSRWTFGLGTKVEI

SEQ ID NO: 7069 - protein, 96 aa, Homo sapiens
EIVLTQSPGTLSLSPGERATFSCRASQSISSNYLAWYRQKPGQAPRLLIYGASTRATGIPDRFSGSGSGTDFTLTISRLEPEDFAVYYCQQYVSSP

SEQ ID NO: 7070 - protein, 108 aa, Homo sapiens
EIVLTQSPGTLSLSPGERATFSCRASQSISSNYLAWYRQKPGQAPRLLIYGASTRATGIPDRFSGSGSGTDFTLTISRLEPEDFAVYYCQQYVSSPITFGQGTRLEIK

SEQ ID NO: 7071 - protein, 95 aa, Homo sapiens
EIVLTQSPGTLSLSPGERATLSCRANQTLSGSYLAWYQQKPGLAPRLLIYDTSNRATGIPDRFSGSGSGTDFTLTISRLEPEDFAVYFCQQYDRS

SEQ ID NO: 7072 - protein, 109 aa, Homo sapiens
EIVLTQSPGTLSLSPGERATLSCRANQTLSGSYLAWYQQKPGLAPRLLIYDTSNRATGIPDRFSGSGSGTDFTLTISRLEPEDFAVYFCQQYDRSSMYTFGQGTKLEIK

SEQ ID NO: 7073 - protein, 93 aa, Homo sapiens
EIVLTQSPGTLSLSPGERATLSCRASESVGTTFFAWHQQKPGQAPRLLIYDTSRRATGVPDRFSGSGSGTDFTLTISRLEPEDIAVYYCQQYG

SEQ ID NO: 7074 - protein, 107 aa, Homo sapiens
EIVLTQSPGTLSLSPGERATLSCRASESVGTTFFAWHQQKPGQAPRLLIYDTSRRATGVPDRFSGSGSGTDFTLTISRLEPEDIAVYYCQQYGIPVTFGGGTKVEIK

SEQ ID NO: 7075 - protein, 96 aa, Homo sapiens
EIVLTQSPGTLSLSPGERATLSCRASESVSTYLAWYQKKPGQAPRLLIYDASHRATGIPARFSGSGSGTDFTLTISSLESEDFGVYYCQQRSNWPP

SEQ ID NO: 7076 - protein, 108 aa, Homo sapiens
EIVLTQSPGTLSLSPGERATLSCRASESVSTYLAWYQKKPGQAPRLLIYDASHRATGIPARFSGSGSGTDFTLTISSLESEDFGVYYCQQRSNWPPITFGQGTRLEIK

SEQ ID NO: 7077 - protein, 95 aa, Homo sapiens
EIVLTQSPGTLSLSPGERATLSCRASHTVSSNSLAWYQQRPGQAPRLLIYGASNRATGIPDRFSGSGSGTDFTLTISRLEPEDFAVYYCQQYGTS

SEQ ID NO: 7078 - protein, 107 aa, Homo sapiens
EIVLTQSPGTLSLSPGERATLSCRASHTVSSNSLAWYQQRPGQAPRLLIYGASNRATGIPDRFSGSGSGTDFTLTISRLEPEDFAVYYCQQYGTSFTFGPGTKVDTK

SEQ ID NO: 7079 - protein, 96 aa, Homo sapiens
EIVLTQSPGTLSLSPGERATLSCRASHTVTNTYLAWYQQKPGQAPRLLIYDTSSRATGIPDRFGGSGSGTDFTLTISRLEPEDFAVYYCQQYGRSP

SEQ ID NO: 7080 - protein, 109 aa, Homo sapiens
EIVLTQSPGTLSLSPGERATLSCRASHTVTNTYLAWYQQKPGQAPRLLIYDTSSRATGIPDRFGGSGSGTDFTLTISRLEPEDFAVYYCQQYGRSPGLTFGGGTKVEIK

SEQ ID NO: 7081 - protein, 92 aa, Homo sapiens
EIVLTQSPGTLSLSPGERATLSCRASPTVSIHYLHWYQQKPGQAPRLLIYSTSSRATGIPDRFSGSGSGTDFTLTISRLEPEDFAVYYCQQF

SEQ ID NO: 7082 - protein, 104 aa, Homo sapiens
EIVLTQSPGTLSLSPGERATLSCRASPTVSIHYLHWYQQKPGQAPRLLIYSTSSRATGIPDRFSGSGSGTDFTLTISRLEPEDFAVYYCQQFAAFGQGTKVEFK

SEQ ID NO: 7083 - protein, 96 aa, Homo sapiens
EIVLTQSPGTLSLSPGERATLSCRASQGVSSGYLAWYQQKPGQAPRLLIYGAASRATGVPDRFSGSGSGTDFTLTISRLQPEDFAVYFCQQYGDSP

SEQ ID NO: 7084 - protein, 108 aa, Homo sapiens
EIVLTQSPGTLSLSPGERATLSCRASQGVSSGYLAWYQQKPGQAPRLLIYGAASRATGVPDRFSGSGSGTDFTLTISRLQPEDFAVYFCQQYGDSPLTFGQGTKVDFK

SEQ ID NO: 7085 - protein, 96 aa, Homo sapiens
EIVLTQSPGTLSLSPGERATLSCRASQIVSSNYLAWYQQKPGQAPRLLIYDASRRATGIPDRFSGSGSGTDFTLTISRLEPEDFVVYYCQQYGNSP

SEQ ID NO: 7086 - protein, 108 aa, Homo sapiens
EIVLTQSPGTLSLSPGERATLSCRASQIVSSNYLAWYQQKPGQAPRLLIYDASRRATGIPDRFSGSGSGTDFTLTISRLEPEDFVVYYCQQYGNSPFTFGPGTKVDLK

SEQ ID NO: 7087 - protein, 96 aa, Homo sapiens
EIVLTQSPGTLSLSPGERATLSCRASQIVTSNYLAWYQQKPGQTPRLLIYDASRRATGIPDRFSGSGSGTDFTLTISRLEPEDFVVYYCQQYGTSP

SEQ ID NO: 7088 - protein, 108 aa, Homo sapiens
EIVLTQSPGTLSLSPGERATLSCRASQIVTSNYLAWYQQKPGQTPRLLIYDASRRATGIPDRFSGSGSGTDFTLTISRLEPEDFVVYYCQQYGTSPFTFGPGTKVDVK

SEQ ID NO: 7089 - protein, 96 aa, Homo sapiens
EIVLTQSPGTLSLSPGERATLSCRASQNIINRSVAWYQQRAGQAPRLLIYDASTRATGIPDRFSGSGSGTDFILTISSLEPEDFAVYYCQQYGDSP

SEQ ID NO: 7090 - protein, 108 aa, Homo sapiens
EIVLTQSPGTLSLSPGERATLSCRASQNIINRSVAWYQQRAGQAPRLLIYDASTRATGIPDRFSGSGSGTDFILTISSLEPEDFAVYYCQQYGDSPRTFGQGTKVEIK

SEQ ID NO: 7091 - protein, 96 aa, Homo sapiens
EIVLTQSPGTLSLSPGERATLSCRASQNVGSNSLAWYQQAPGQSPRLLIYGASSRATGIPDRFSGSGSGTDFTLTIGRLEPEDFAVYYCHQYGTSP

SEQ ID NO: 7092 - protein, 108 aa, Homo sapiens
EIVLTQSPGTLSLSPGERATLSCRASQNVGSNSLAWYQQAPGQSPRLLIYGASSRATGIPDRFSGSGSGTDFTLTIGRLEPEDFAVYYCHQYGTSPLTVGGGTKVEIK

SEQ ID NO: 7093 - protein, 96 aa, Homo sapiens
EIVLTQSPGTLSLSPGERATLSCRASQNVKSNSLAWYQQKPGQAPRLLIYGASTRATGIPDRFSGSGSGTDFTLTINRLEPEDFAVYFCQQYGVSP

SEQ ID NO: 7094 - protein, 107 aa, Homo sapiens
EIVLTQSPGTLSLSPGERATLSCRASQNVKSNSLAWYQQKPGQAPRLLIYGASTRATGIPDRFSGSGSGTDFTLTINRLEPEDFAVYFCQQYGVSPGTFGRGTKVEI

SEQ ID NO: 7095 - protein, 96 aa, Homo sapiens
EIVLTQSPGTLSLSPGERATLSCRASQNVNNNYLAWYQQKPGLAPRLLIYDASSWASGIPDRFSGSGSGTDFTLTISRLEPEDFAVYYCQQSGASP

SEQ ID NO: 7096 - protein, 108 aa, Homo sapiens
EIVLTQSPGTLSLSPGERATLSCRASQNVNNNYLAWYQQKPGLAPRLLIYDASSWASGIPDRFSGSGSGTDFTLTISRLEPEDFAVYYCQQSGASPWTFGQGTKVEIK

SEQ ID NO: 7097 - protein, 96 aa, Homo sapiens
EIVLTQSPGTLSLSPGERATLSCRASQRLTSTYLAWYRQKPGQAPRLLIYGASIRATGVPDRFSGSGSGTDFTLTISRLEPEDFAVYYCQRYGNSP

SEQ ID NO: 7098 - protein, 108 aa, Homo sapiens
EIVLTQSPGTLSLSPGERATLSCRASQRLTSTYLAWYRQKPGQAPRLLIYGASIRATGVPDRFSGSGSGTDFTLTISRLEPEDFAVYYCQRYGNSPETFGQGTKVEIK

SEQ ID NO: 7099 - protein, 95 aa, Homo sapiens
EIVLTQSPGTLSLSPGERATLSCRASQSFSSTSLAWYQQKPGQAPRLLIYGASTRATGLPDRFGASGSGTDFTLTISRLEPEDFAVYYCQQYDSS

SEQ ID NO: 7100 - protein, 108 aa, Homo sapiens
EIVLTQSPGTLSLSPGERATLSCRASQSFSSTSLAWYQQKPGQAPRLLIYGASTRATGLPDRFGASGSGTDFTLTISRLEPEDFAVYYCQQYDSSTFTFGGGTKVEMK

SEQ ID NO: 7101 - protein, 95 aa, Homo sapiens
EIVLTQSPGTLSLSPGERATLSCRASQSFSSTSLAWYQQKPGQAPRLVLYGASTRATGIPDRFSGSGSGTDFTLSISRLEPEDFAVYYCQQYDSS

SEQ ID NO: 7102 - protein, 108 aa, Homo sapiens
EIVLTQSPGTLSLSPGERATLSCRASQSFSSTSLAWYQQKPGQAPRLVLYGASTRATGIPDRFSGSGSGTDFTLSISRLEPEDFAVYYCQQYDSSTFTFGGGTKVEMK

SEQ ID NO: 7103 - protein, 96 aa, Homo sapiens
EIVLTQSPGTLSLSPGERATLSCRASQSIRNNYLAWYQQKPGQAPRLLMYGVSIRADGTPGRFSGSGSGTDFTLTISRLEPEDIAVYFCQQSGSSP

SEQ ID NO: 7104 - protein, 108 aa, Homo sapiens
EIVLTQSPGTLSLSPGERATLSCRASQSIRNNYLAWYQQKPGQAPRLLMYGVSIRADGTPGRFSGSGSGTDFTLTISRLEPEDIAVYFCQQSGSSPRTFGQGTKVEIK

SEQ ID NO: 7105 - protein, 96 aa, Homo sapiens
EIVLTQSPGTLSLSPGERATLSCRASQSIRNSNLAWYQQKPGQAPRLLIYAASSRAAGIPDRFSGRGSGTDFTLTISRLEPEDLAVYYCQQFGTSP

SEQ ID NO: 7106 - protein, 108 aa, Homo sapiens
EIVLTQSPGTLSLSPGERATLSCRASQSIRNSNLAWYQQKPGQAPRLLIYAASSRAAGIPDRFSGRGSGTDFTLTISRLEPEDLAVYYCQQFGTSPFTFGGGTKVEIK

SEQ ID NO: 7107 - protein, 96 aa, Homo sapiens
EIVLTQSPGTLSLSPGERATLSCRASQSISNFLAWYQQKPGQAPRLLIYDASNRATGIPARFSGSGSGTDFTLTISSLEPEDFAVYYCQQRSNWPP

SEQ ID NO: 7108 - protein, 108 aa, Homo sapiens
EIVLTQSPGTLSLSPGERATLSCRASQSISNFLAWYQQKPGQAPRLLIYDASNRATGIPARFSGSGSGTDFTLTISSLEPEDFAVYYCQQRSNWPPITFGQGTRLEIK

SEQ ID NO: 7109 - protein, 96 aa, Homo sapiens
EIVLTQSPGTLSLSPGERATLSCRASQSISNHLAWYQQKPGQAPRLLMFDASNRATGVPARFSGSGFGTDFTLTISSLETEDFAVYYCQQRFNWPP

SEQ ID NO: 7110 - protein, 108 aa, Homo sapiens
EIVLTQSPGTLSLSPGERATLSCRASQSISNHLAWYQQKPGQAPRLLMFDASNRATGVPARFSGSGFGTDFTLTISSLETEDFAVYYCQQRFNWPPITFGQGTRVEIK

SEQ ID NO: 7111 - protein, 97 aa, Homo sapiens
EIVLTQSPGTLSLSPGERATLSCRASQSISNNNLAWYQQKPGQAPRLLIYGSSTRATGIPARFSGSGSGTEFTLTISSLQSEDFAVYYCQQYNNWPP

SEQ ID NO: 7112 - protein, 109 aa, Homo sapiens
EIVLTQSPGTLSLSPGERATLSCRASQSISNNNLAWYQQKPGQAPRLLIYGSSTRATGIPARFSGSGSGTEFTLTISSLQSEDFAVYYCQQYNNWPPLTFGGGTKVEIK

SEQ ID NO: 7113 - protein, 95 aa, Homo sapiens
EIVLTQSPGTLSLSPGERATLSCRASQSISSNYLAWYQQKPGLAPRLLIYDASTRATGIPDRFSGSGSGTGFTLTISGLEPEDFAVYYCQQYGSS

SEQ ID NO: 7114 - protein, 108 aa, Homo sapiens
EIVLTQSPGTLSLSPGERATLSCRASQSISSNYLAWYQQKPGLAPRLLIYDASTRATGIPDRFSGSGSGTGFTLTISGLEPEDFAVYYCQQYGSSSLTFGGGTKVEIK

SEQ ID NO: 7115 - protein, 96 aa, Homo sapiens
EIVLTQSPGTLSLSPGERATLSCRASQSISSNYLAWYQQKPGQAPRLLIYDASRRATGIPDRFSGSGSGTDFTLTISRLEPEDFAVYYCQQYGGSP

SEQ ID NO: 7116 - protein, 108 aa, Homo sapiens
EIVLTQSPGTLSLSPGERATLSCRASQSISSNYLAWYQQKPGQAPRLLIYDASRRATGIPDRFSGSGSGTDFTLTISRLEPEDFAVYYCQQYGGSPLTFGGGTKVEIK

SEQ ID NO: 7117 - protein, 93 aa, Homo sapiens
EIVLTQSPGTLSLSPGERATLSCRASQSISSRYLAWYQQKPGQAPRLLIYAASSRATGIPDRFSGSGSGTDFTLTISRLEPEDFAVYYCQQYG

SEQ ID NO: 7118 - protein, 108 aa, Homo sapiens
EIVLTQSPGTLSLSPGERATLSCRASQSISSRYLAWYQQKPGQAPRLLIYAASSRATGIPDRFSGSGSGTDFTLTISRLEPEDFAVYYCQQYGSFLYSFGQGTKLEIK

SEQ ID NO: 7119 - protein, 97 aa, Homo sapiens
EIVLTQSPGTLSLSPGERATLSCRASQSISSSHLAWYQQEPGQAPRLLIYGASSRATGIPERFSGSGSGTDFTLTISRLEPEDFAVYYCQLYGRSPP

SEQ ID NO: 7120 - protein, 109 aa, Homo sapiens
EIVLTQSPGTLSLSPGERATLSCRASQSISSSHLAWYQQEPGQAPRLLIYGASSRATGIPERFSGSGSGTDFTLTISRLEPEDFAVYYCQLYGRSPPYTFGQGTKLEIK

SEQ ID NO: 7121 - protein, 95 aa, Homo sapiens
EIVLTQSPGTLSLSPGERATLSCRASQSISSTYLAWYQQRPGQAPRLLIYGASSRATGIPDRFSGSGSGTDFTLTISRLEPEDFAVYYCQQYGDS

SEQ ID NO: 7122 - protein, 108 aa, Homo sapiens
EIVLTQSPGTLSLSPGERATLSCRASQSISSTYLAWYQQRPGQAPRLLIYGASSRATGIPDRFSGSGSGTDFTLTISRLEPEDFAVYYCQQYGDSKYSFGKGTKLEIK

SEQ ID NO: 7123 - protein, 95 aa, Homo sapiens
EIVLTQSPGTLSLSPGERATLSCRASQSLSSSQLAWYQQKSGQAPRLLIYGASTRATGIPDRFSGSGSGTDFTLTINRLEAEDFALYYCQQYGSS

SEQ ID NO: 7124 - protein, 108 aa, Homo sapiens
EIVLTQSPGTLSLSPGERATLSCRASQSLSSSQLAWYQQKSGQAPRLLIYGASTRATGIPDRFSGSGSGTDFTLTINRLEAEDFALYYCQQYGSSIFTFGGGTKVEIK

SEQ ID NO: 7125 - protein, 96 aa, Homo sapiens
EIVLTQSPGTLSLSPGERATLSCRASQSLSSSYLAWYQHKPGQAPRLLIYGASSRATGIPDRFSGSGSGTDFTLTISRLEPEDFAVYYCQQYGNSP

SEQ ID NO: 7126 - protein, 115 aa, Homo sapiens
EIVLTQSPGTLSLSPGERATLSCRASQSLSSSYLAWYQHKPGQAPRLLIYGASSRATGIPDRFSGSGSGTDFTLTISRLEPEDFAVYYCQQYGNSPTFGQGTSPTFGQGTKVEIK

SEQ ID NO: 7127 - protein, 96 aa, Homo sapiens
EIVLTQSPGTLSLSPGERATLSCRASQSLSSSYLAWYQQKPGQAPRLLIYGASSRATGIPDRFSGSGSGTDFTLTISRLEPEDFAVYFCQHYGSSP

SEQ ID NO: 7128 - protein, 109 aa, Homo sapiens
EIVLTQSPGTLSLSPGERATLSCRASQSLSSSYLAWYQQKPGQAPRLLIYGASSRATGIPDRFSGSGSGTDFTLTISRLEPEDFAVYFCQHYGSSPGYTFGQGTKVEIK

SEQ ID NO: 7129 - protein, 97 aa, Homo sapiens
EIVLTQSPGTLSLSPGERATLSCRASQSLSTNSLAWYQQKPGQAPRLLIHGASSRATGIPDRFSGSGSGTDFTLTISRLEPEDFAVYYCHQFGGSLP

SEQ ID NO: 7130 - protein, 108 aa, Homo sapiens
EIVLTQSPGTLSLSPGERATLSCRASQSLSTNSLAWYQQKPGQAPRLLIHGASSRATGIPDRFSGSGSGTDFTLTISRLEPEDFAVYYCHQFGGSLPLTFGGGTKVEI

SEQ ID NO: 7131 - protein, 95 aa, Homo sapiens
EIVLTQSPGTLSLSPGERATLSCRASQSMSNNHLAWYQQKPGQAPRLLIYETSNRATGTPDRFSGRGSGTDFTLTISRLQHEDFAVYYCQQSGSS

SEQ ID NO: 7132 - protein, 108 aa, Homo sapiens
EIVLTQSPGTLSLSPGERATLSCRASQSMSNNHLAWYQQKPGQAPRLLIYETSNRATGTPDRFSGRGSGTDFTLTISRLQHEDFAVYYCQQSGSSTSTFGQGTKLEIK

SEQ ID NO: 7133 - protein, 96 aa, Homo sapiens
EIVLTQSPGTLSLSPGERATLSCRASQSVESSYLAWYQQRPGQAPRLLIHAASSRATGISDRFSGSGSGTDFTLTISRLEPEDFAVYYCQQYGRSP

SEQ ID NO: 7134 - protein, 108 aa, Homo sapiens
EIVLTQSPGTLSLSPGERATLSCRASQSVESSYLAWYQQRPGQAPRLLIHAASSRATGISDRFSGSGSGTDFTLTISRLEPEDFAVYYCQQYGRSPRTFGQGTKVEIK

SEQ ID NO: 7135 - protein, 96 aa, Homo sapiens
EIVLTQSPGTLSLSPGERATLSCRASQSVGNNFLAWYQQNPGQAPRLLIYGASSRATGIPDRFSGSGSGTDFTLTISRLESEDFAVYYCQQYGGSP

SEQ ID NO: 7136 - protein, 109 aa, Homo sapiens
EIVLTQSPGTLSLSPGERATLSCRASQSVGNNFLAWYQQNPGQAPRLLIYGASSRATGIPDRFSGSGSGTDFTLTISRLESEDFAVYYCQQYGGSPRITFGQGTRLEIK

SEQ ID NO: 7137 - protein, 96 aa, Homo sapiens
EIVLTQSPGTLSLSPGERATLSCRASQSVGSGSLAWYQQKPGQVPRLLIYGASNRATGIPDRFSGSGSGTDFTLTISRLEPEDFVVYYCQQYGSSP

SEQ ID NO: 7138 - protein, 109 aa, Homo sapiens
EIVLTQSPGTLSLSPGERATLSCRASQSVGSGSLAWYQQKPGQVPRLLIYGASNRATGIPDRFSGSGSGTDFTLTISRLEPEDFVVYYCQQYGSSPRGPTFGGGTKVEI

SEQ ID NO: 7139 - protein, 96 aa, Homo sapiens
EIVLTQSPGTLSLSPGERATLSCRASQSVGSNNLAWYQQRPGLAPRLLIHGASSRATGIPDRFSGSGSGTDFTLTIGRLEPEDFALYYCQQYGSSP

SEQ ID NO: 7140 - protein, 108 aa, Homo sapiens
EIVLTQSPGTLSLSPGERATLSCRASQSVGSNNLAWYQQRPGLAPRLLIHGASSRATGIPDRFSGSGSGTDFTLTIGRLEPEDFALYYCQQYGSSPLTFGGGTKVDIK

SEQ ID NO: 7141 - protein, 96 aa, Homo sapiens
EIVLTQSPGTLSLSPGERATLSCRASQSVGSNSLAWYQQKPGQAPRLLIYGASSRATGIPDRFSGSGSGTDFTLTISRLEPEDFAVYYCQQYGGSP

SEQ ID NO: 7142 - protein, 108 aa, Homo sapiens
EIVLTQSPGTLSLSPGERATLSCRASQSVGSNSLAWYQQKPGQAPRLLIYGASSRATGIPDRFSGSGSGTDFTLTISRLEPEDFAVYYCQQYGGSPRTFGQGTKVEIK

SEQ ID NO: 7143 - protein, 96 aa, Homo sapiens
EIVLTQSPGTLSLSPGERATLSCRASQSVGSSSLAWYQQKPGQAPRLLIYAASSRATGIPDRFSGSGSGTDFTLTISRLEPEDFAVYYCQQYGTSP

SEQ ID NO: 7144 - protein, 108 aa, Homo sapiens
EIVLTQSPGTLSLSPGERATLSCRASQSVGSSSLAWYQQKPGQAPRLLIYAASSRATGIPDRFSGSGSGTDFTLTISRLEPEDFAVYYCQQYGTSPRTFGQGTKVEIK

SEQ ID NO: 7145 - protein, 96 aa, Homo sapiens
EIVLTQSPGTLSLSPGERATLSCRASQSVKSSSLAWYQQKPGQAPRLLIYDVSTRATGIPDRFSGSGSGTDFTLTISRLEPEDFAVYYCQQYGVSP

SEQ ID NO: 7146 - protein, 107 aa, Homo sapiens
EIVLTQSPGTLSLSPGERATLSCRASQSVKSSSLAWYQQKPGQAPRLLIYDVSTRATGIPDRFSGSGSGTDFTLTISRLEPEDFAVYYCQQYGVSPGTFGRGTKVEI

SEQ ID NO: 7147 - protein, 96 aa, Homo sapiens
EIVLTQSPGTLSLSPGERATLSCRASQSVNNNYLAWYQQKPAQAPRLLIYDASSRATGTPDRFSGRGSGTDFTLTISRLEPEDFAVYFCQQYGSSP

SEQ ID NO: 7148 - protein, 110 aa, Homo sapiens
EIVLTQSPGTLSLSPGERATLSCRASQSVNNNYLAWYQQKPAQAPRLLIYDASSRATGTPDRFSGRGSGTDFTLTISRLEPEDFAVYFCQQYGSSPRGLTFGGGTKVEIK

SEQ ID NO: 7149 - protein, 95 aa, Homo sapiens
EIVLTQSPGTLSLSPGERATLSCRASQSVNSNHLAWYQQKSGQAPRLLIYGASIRATGIPDRFSGSGSGTDFTLIISRLEAEDFALYYCQQYGSS

SEQ ID NO: 7150 - protein, 108 aa, Homo sapiens
EIVLTQSPGTLSLSPGERATLSCRASQSVNSNHLAWYQQKSGQAPRLLIYGASIRATGIPDRFSGSGSGTDFTLIISRLEAEDFALYYCQQYGSSTFTFGGGTKVAIK

SEQ ID NO: 7151 - protein, 95 aa, Homo sapiens
EIVLTQSPGTLSLSPGERATLSCRASQSVNSNYLAWYQQKPGQAPRLLIYGASTRATGIPDRFSGSGSGTDFTLTISRLEPEDFAVYSCQQYGSS

SEQ ID NO: 7152 - protein, 108 aa, Homo sapiens
EIVLTQSPGTLSLSPGERATLSCRASQSVNSNYLAWYQQKPGQAPRLLIYGASTRATGIPDRFSGSGSGTDFTLTISRLEPEDFAVYSCQQYGSSTFTFGGGTKVEIK

SEQ ID NO: 7153 - protein, 95 aa, Homo sapiens
EIVLTQSPGTLSLSPGERATLSCRASQSVNSNYLAWYQQKSGQAPRLLIYDASTRATGIPDRFSGSGSGTDFTLTISRLEAEDFALYYCQQYGSS

SEQ ID NO: 7154 - protein, 108 aa, Homo sapiens
EIVLTQSPGTLSLSPGERATLSCRASQSVNSNYLAWYQQKSGQAPRLLIYDASTRATGIPDRFSGSGSGTDFTLTISRLEAEDFALYYCQQYGSSTFTFGGGTKVEIK

SEQ ID NO: 7155 - protein, 95 aa, Homo sapiens
EIVLTQSPGTLSLSPGERATLSCRASQSVNSYSLVWYQQKPGQAPRLLIYGASSRATGIPDRFSGSGSGTDFTLTISRLEPEDFAVYYCLHYGTS

SEQ ID NO: 7156 - protein, 108 aa, Homo sapiens
EIVLTQSPGTLSLSPGERATLSCRASQSVNSYSLVWYQQKPGQAPRLLIYGASSRATGIPDRFSGSGSGTDFTLTISRLEPEDFAVYYCLHYGTSSWTFGQGTKVEIK

SEQ ID NO: 7157 - protein, 95 aa, Homo sapiens
EIVLTQSPGTLSLSPGERATLSCRASQSVRNTYLAWYQQKPGQAPRLLIYGASSRATGIPDRFSGSGSGTDFTLTITRLEPEDFAVYYCQHYDSS

SEQ ID NO: 7158 - protein, 108 aa, Homo sapiens
EIVLTQSPGTLSLSPGERATLSCRASQSVRNTYLAWYQQKPGQAPRLLIYGASSRATGIPDRFSGSGSGTDFTLTITRLEPEDFAVYYCQHYDSSRGTFGQGTKVEIK

SEQ ID NO: 7159 - protein, 96 aa, Homo sapiens
EIVLTQSPGTLSLSPGERATLSCRASQSVRSSSLAWYQQKPGQAPRLLIYGASNRASGIPDRFSGSESGTHFTLTINRLEPEDFAVYYCQQYGDSP

SEQ ID NO: 7160 - protein, 107 aa, Homo sapiens
EIVLTQSPGTLSLSPGERATLSCRASQSVRSSSLAWYQQKPGQAPRLLIYGASNRASGIPDRFSGSESGTHFTLTINRLEPEDFAVYYCQQYGDSPGTFGQGTKVEI

SEQ ID NO: 7161 - protein, 96 aa, Homo sapiens
EIVLTQSPGTLSLSPGERATLSCRASQSVRSSSLAWYQQKPGQAPRLLIYGASSRATGIPDRFSGSGSGTDFTLTISRLEPGDFAVYYCQQYGSLP

SEQ ID NO: 7162 - protein, 108 aa, Homo sapiens
EIVLTQSPGTLSLSPGERATLSCRASQSVRSSSLAWYQQKPGQAPRLLIYGASSRATGIPDRFSGSGSGTDFTLTISRLEPGDFAVYYCQQYGSLPGTFGQGTKVEIK

SEQ ID NO: 7163 - protein, 96 aa, Homo sapiens
EIVLTQSPGTLSLSPGERATLSCRASQSVRSSSLAWYQQKPGQPPRLLIYGASSRATGLPDRFSGSGSGTDFTLTISRLEPEDFAMYYCQQYGSSP

SEQ ID NO: 7164 - protein, 108 aa, Homo sapiens
EIVLTQSPGTLSLSPGERATLSCRASQSVRSSSLAWYQQKPGQPPRLLIYGASSRATGLPDRFSGSGSGTDFTLTISRLEPEDFAMYYCQQYGSSPGTFGQGTKVEIK

SEQ ID NO: 7165 - protein, 96 aa, Homo sapiens
EIVLTQSPGTLSLSPGERATLSCRASQSVRSSSLAWYRQKPGQPPRLLIYGASNRATGIPDRFSGSGSGTDFTLTISRLEPEDFAMYYCQQYGSSP

SEQ ID NO: 7166 - protein, 108 aa, Homo sapiens
EIVLTQSPGTLSLSPGERATLSCRASQSVRSSSLAWYRQKPGQPPRLLIYGASNRATGIPDRFSGSGSGTDFTLTISRLEPEDFAMYYCQQYGSSPGTFGQGTKVEIK

SEQ ID NO: 7167 - protein, 96 aa, Homo sapiens
EIVLTQSPGTLSLSPGERATLSCRASQSVRSSYLAWYQHKPGQAPRLLIYGASSRATGIPDRFSGSGSGTDFTLTISRLEPEDCAVYFCQQYGSSP

SEQ ID NO: 7168 - protein, 108 aa, Homo sapiens
EIVLTQSPGTLSLSPGERATLSCRASQSVRSSYLAWYQHKPGQAPRLLIYGASSRATGIPDRFSGSGSGTDFTLTISRLEPEDCAVYFCQQYGSSPQTFGGGTKVEIK

SEQ ID NO: 7169 - protein, 96 aa, Homo sapiens
EIVLTQSPGTLSLSPGERATLSCRASQSVRSSYLAWYQQKPGQAPRLLIYGASSRATGIPDRFSGSGSGTDFSLTISRLEPEDFAVYYCQQYGNSP

SEQ ID NO: 7170 - protein, 108 aa, Homo sapiens
EIVLTQSPGTLSLSPGERATLSCRASQSVRSSYLAWYQQKPGQAPRLLIYGASSRATGIPDRFSGSGSGTDFSLTISRLEPEDFAVYYCQQYGNSPQTFGQGTKLEIK

SEQ ID NO: 7171 - protein, 95 aa, Homo sapiens
EIVLTQSPGTLSLSPGERATLSCRASQSVSASYLAWYQQKPGQAPRLLIYGTSSRATGIPDRFSGSGSGTDFTLTISRLEPEDFAVYYCQQYGSS

SEQ ID NO: 7172 - protein, 109 aa, Homo sapiens
EIVLTQSPGTLSLSPGERATLSCRASQSVSASYLAWYQQKPGQAPRLLIYGTSSRATGIPDRFSGSGSGTDFTLTISRLEPEDFAVYYCQQYGSSVALTFGGGTKVEIK

SEQ ID NO: 7173 - protein, 97 aa, Homo sapiens
EIVLTQSPGTLSLSPGERATLSCRASQSVSGGFLAWYQQKPGQAPRLLVYGASNRATGIPDRFSGSGSGTDFTLTISRLDPEDFAVYYCQHYGRSPP

SEQ ID NO: 7174 - protein, 109 aa, Homo sapiens
EIVLTQSPGTLSLSPGERATLSCRASQSVSGGFLAWYQQKPGQAPRLLVYGASNRATGIPDRFSGSGSGTDFTLTISRLDPEDFAVYYCQHYGRSPPYTFGQGTKLDIK

SEQ ID NO: 7175 - protein, 95 aa, Homo sapiens
EIVLTQSPGTLSLSPGERATLSCRASQSVSGNSLAWYQQKPGQAPRLLIYDTSNRATGVPDRFSGSGSGTDFTLIVSILEPEDFAVYYCHHYDTS

SEQ ID NO: 7176 - protein, 107 aa, Homo sapiens
EIVLTQSPGTLSLSPGERATLSCRASQSVSGNSLAWYQQKPGQAPRLLIYDTSNRATGVPDRFSGSGSGTDFTLIVSILEPEDFAVYYCHHYDTSTSTFGQGTKLEI

SEQ ID NO: 7177 - protein, 95 aa, Homo sapiens
EIVLTQSPGTLSLSPGERATLSCRASQSVSGNYLAWYQQRPGQAPRLLIYGASNRATGIPDRFSGSGSGTEFTLTISRLEPEDFAVYCCQQYGSS

SEQ ID NO: 7178 - protein, 107 aa, Homo sapiens
EIVLTQSPGTLSLSPGERATLSCRASQSVSGNYLAWYQQRPGQAPRLLIYGASNRATGIPDRFSGSGSGTEFTLTISRLEPEDFAVYCCQQYGSSTLTFGGGTKVEI

SEQ ID NO: 7179 - protein, 94 aa, Homo sapiens
EIVLTQSPGTLSLSPGERATLSCRASQSVSNLAWYQQKPDQAPRLLIYGTSSRATGIPDRFSGSGSETDFTLTITGLEPEDFAVYYCQQYATSP

SEQ ID NO: 7180 - protein, 107 aa, Homo sapiens
EIVLTQSPGTLSLSPGERATLSCRASQSVSNLAWYQQKPDQAPRLLIYGTSSRATGIPDRFSGSGSETDFTLTITGLEPEDFAVYYCQQYATSPGITFGQGTRLEIK

SEQ ID NO: 7181 - protein, 93 aa, Homo sapiens
EIVLTQSPGTLSLSPGERATLSCRASQSVSNNYLAWYQQKPGQAPRLLIYGASSRATGIPDRFSGSGSGTDFTLTISRLEPEDFAVYHCQQYG

SEQ ID NO: 7182 - protein, 108 aa, Homo sapiens
EIVLTQSPGTLSLSPGERATLSCRASQSVSNNYLAWYQQKPGQAPRLLIYGASSRATGIPDRFSGSGSGTDFTLTISRLEPEDFAVYHCQQYGRFPWTFGQGTRVEIK

SEQ ID NO: 7183 - protein, 95 aa, Homo sapiens
EIVLTQSPGTLSLSPGERATLSCRASQSVSNNYLAWYQQKSGQAPRLLIYGASTRATGIPDRFSGSGSGTDFTLTINRLEAEDFALYYCQQYGSS

SEQ ID NO: 7184 - protein, 108 aa, Homo sapiens
EIVLTQSPGTLSLSPGERATLSCRASQSVSNNYLAWYQQKSGQAPRLLIYGASTRATGIPDRFSGSGSGTDFTLTINRLEAEDFALYYCQQYGSSTFTFGGGTKVEIK

SEQ ID NO: 7185 - protein, 96 aa, Homo sapiens
EIVLTQSPGTLSLSPGERATLSCRASQSVSNSYLAWYQQKPGQAPRLLIYGASSRATGIPDRFSGSGSGTDFTLTITRLEPEDFAMYYCQHYVGSP

SEQ ID NO: 7186 - protein, 108 aa, Homo sapiens
EIVLTQSPGTLSLSPGERATLSCRASQSVSNSYLAWYQQKPGQAPRLLIYGASSRATGIPDRFSGSGSGTDFTLTITRLEPEDFAMYYCQHYVGSPLTFGGGTKVEIK

SEQ ID NO: 7187 - protein, 96 aa, Homo sapiens
EIVLTQSPGTLSLSPGERATLSCRASQSVSNTYLAWYQQKPGQAPRLLIYGASSRATGIPDRFSGSGSGTDFTLTISRLEPEDFAVYYCQQYGGSP

SEQ ID NO: 7188 - protein, 108 aa, Homo sapiens
EIVLTQSPGTLSLSPGERATLSCRASQSVSNTYLAWYQQKPGQAPRLLIYGASSRATGIPDRFSGSGSGTDFTLTISRLEPEDFAVYYCQQYGGSPRTFGQGTKVDIK

SEQ ID NO: 7189 - protein, 95 aa, Homo sapiens
EIVLTQSPGTLSLSPGERATLSCRASQSVSNTYLAWYQQKPGQAPRLLIYGASSRATGIPDRFSGSGSGTDFTLTISRLEPEDFAVYYCQQYSSS

SEQ ID NO: 7190 - protein, 108 aa, Homo sapiens
EIVLTQSPGTLSLSPGERATLSCRASQSVSNTYLAWYQQKPGQAPRLLIYGASSRATGIPDRFSGSGSGTDFTLTISRLEPEDFAVYYCQQYSSSTYSFGQGTKLEFK

SEQ ID NO: 7191 - protein, 96 aa, Homo sapiens
EIVLTQSPGTLSLSPGERATLSCRASQSVSSGHLAWYQQKPGQAPRLLIYGASRRATGIPDRFSGSGSGTDFTLSISRLEPEDFAVYYCQQYGGSP

SEQ ID NO: 7192 - protein, 109 aa, Homo sapiens
EIVLTQSPGTLSLSPGERATLSCRASQSVSSGHLAWYQQKPGQAPRLLIYGASRRATGIPDRFSGSGSGTDFTLSISRLEPEDFAVYYCQQYGGSPGYTFGQGTNLEIK

SEQ ID NO: 7193 - protein, 96 aa, Homo sapiens
EIVLTQSPGTLSLSPGERATLSCRASQSVSSGYLAWYQHKPGQSPRLLIYGASSRATDIPDRFSGSGSGTDFTLTISRLEPEDFAVYYCQHYGSSP

SEQ ID NO: 7194 - protein, 109 aa, Homo sapiens
EIVLTQSPGTLSLSPGERATLSCRASQSVSSGYLAWYQHKPGQSPRLLIYGASSRATDIPDRFSGSGSGTDFTLTISRLEPEDFAVYYCQHYGSSPMYTFGQGTKLEIK

SEQ ID NO: 7195 - protein, 96 aa, Homo sapiens
EIVLTQSPGTLSLSPGERATLSCRASQSVSSGYLAWYQQKPGQAPRLLIYGASSRATGIPDRFSGSGSGTDFTLTISRLEPEDFAVYYCQQYGSSP

SEQ ID NO: 7196 - protein, 109 aa, Homo sapiens
EIVLTQSPGTLSLSPGERATLSCRASQSVSSGYLAWYQQKPGQAPRLLIYGASSRATGIPDRFSGSGSGTDFTLTISRLEPEDFAVYYCQQYGSSPLYTFGQGTKLEIK

SEQ ID NO: 7197 - protein, 95 aa, Homo sapiens
EIVLTQSPGTLSLSPGERATLSCRASQSVSSNCLVWYQQKPGQAPRLVIYGASSRATGIPDRFSGSGSGTDFTLTISRLEPEDFAVYYCQQYGSS

SEQ ID NO: 7198 - protein, 108 aa, Homo sapiens
EIVLTQSPGTLSLSPGERATLSCRASQSVSSNCLVWYQQKPGQAPRLVIYGASSRATGIPDRFSGSGSGTDFTLTISRLEPEDFAVYYCQQYGSSVWTFGQGTKVEIK

SEQ ID NO: 7199 - protein, 96 aa, Homo sapiens
EIVLTQSPGTLSLSPGERATLSCRASQSVSSNLAWYQQIPGQAPRLLIYGASTRATGIPARFSGSGSGTEFTLTISSMQSEDFAVYYCQQYNNWPP

SEQ ID NO: 7200 - protein, 108 aa, Homo sapiens
EIVLTQSPGTLSLSPGERATLSCRASQSVSSNLAWYQQIPGQAPRLLIYGASTRATGIPARFSGSGSGTEFTLTISSMQSEDFAVYYCQQYNNWPPWSFGQGTKVEIK

SEQ ID NO: 7201 - protein, 96 aa, Homo sapiens
EIVLTQSPGTLSLSPGERATLSCRASQSVSSNLAWYQQKPGQAPRLLIYGASTRATGIPARFSGSGSGTEFTLTISSLQSEDFAVYYCQQYNNWPP

SEQ ID NO: 7202 - protein, 108 aa, Homo sapiens
EIVLTQSPGTLSLSPGERATLSCRASQSVSSNLAWYQQKPGQAPRLLIYGASTRATGIPARFSGSGSGTEFTLTISSLQSEDFAVYYCQQYNNWPPLTFGGGTKVEIK

SEQ ID NO: 7203 - protein, 96 aa, Homo sapiens
EIVLTQSPGTLSLSPGERATLSCRASQSVSSNSLAWYQQKPGQAPRLLIYAASSRASGIPDRFSGSGSGTDFTLTISRLEPEDFAVYYCQQYGASP

SEQ ID NO: 7204 - protein, 108 aa, Homo sapiens
EIVLTQSPGTLSLSPGERATLSCRASQSVSSNSLAWYQQKPGQAPRLLIYAASSRASGIPDRFSGSGSGTDFTLTISRLEPEDFAVYYCQQYGASPRTFGQGTKVEIK

SEQ ID NO: 7205 - protein, 95 aa, Homo sapiens
EIVLTQSPGTLSLSPGERATLSCRASQSVSSNYLAWYQQKPGLAPRLLIYDASSRATGIPDRFSGSGSGTDFTLTISRLEPEDFAVYYCQQHGSS

SEQ ID NO: 7206 - protein, 108 aa, Homo sapiens
EIVLTQSPGTLSLSPGERATLSCRASQSVSSNYLAWYQQKPGLAPRLLIYDASSRATGIPDRFSGSGSGTDFTLTISRLEPEDFAVYYCQQHGSSSLTFGGGTKVEIK

SEQ ID NO: 7207 - protein, 96 aa, Homo sapiens
EIVLTQSPGTLSLSPGERATLSCRASQSVSSNYLAWYQQKPGQAPRLLIYDASSRAAGIPDRFSGSGSGTDFTLTISRLEPEDFALYYCQHYGSSP

SEQ ID NO: 7208 - protein, 109 aa, Homo sapiens
EIVLTQSPGTLSLSPGERATLSCRASQSVSSNYLAWYQQKPGQAPRLLIYDASSRAAGIPDRFSGSGSGTDFTLTISRLEPEDFALYYCQHYGSSPRWTFGQGTKVDIK

SEQ ID NO: 7209 - protein, 97 aa, Homo sapiens
EIVLTQSPGTLSLSPGERATLSCRASQSVSSNYLAWYQQKPGQAPRLLIYGASNRATGIPDRFSGSGSGTDFTLTITRLEPADFAVYYCQQYGTSPP

SEQ ID NO: 7210 - protein, 109 aa, Homo sapiens
EIVLTQSPGTLSLSPGERATLSCRASQSVSSNYLAWYQQKPGQAPRLLIYGASNRATGIPDRFSGSGSGTDFTLTITRLEPADFAVYYCQQYGTSPPYTFGQGTKLEIK

SEQ ID NO: 7211 - protein, 96 aa, Homo sapiens
EIVLTQSPGTLSLSPGERATLSCRASQSVSSNYLAWYQQKPGQAPRLLIYGASSRATGIPDRFSGSGSGTDFTLTISRLELEDFVVYYCQQYGSSP

SEQ ID NO: 7212 - protein, 108 aa, Homo sapiens
EIVLTQSPGTLSLSPGERATLSCRASQSVSSNYLAWYQQKPGQAPRLLIYGASSRATGIPDRFSGSGSGTDFTLTISRLELEDFVVYYCQQYGSSPLTFGGGTKVEIK

SEQ ID NO: 7213 - protein, 96 aa, Homo sapiens
EIVLTQSPGTLSLSPGERATLSCRASQSVSSNYLAWYQQKSGQAPRLLIYGASSRATGIPDRFSGSGSGTDFTLTISRLEPEDFAVFYCQQYGSSP

SEQ ID NO: 7214 - protein, 108 aa, Homo sapiens
EIVLTQSPGTLSLSPGERATLSCRASQSVSSNYLAWYQQKSGQAPRLLIYGASSRATGIPDRFSGSGSGTDFTLTISRLEPEDFAVFYCQQYGSSPLTFGGGTKVEIK

SEQ ID NO: 7215 - protein, 95 aa, Homo sapiens
EIVLTQSPGTLSLSPGERATLSCRASQSVSSNYLAWYQQKSGQAPRLLIYGASTRATGIPDRFSGSGSGTDFTLTITRLEAEDFALYYCQQYGTS

SEQ ID NO: 7216 - protein, 108 aa, Homo sapiens
EIVLTQSPGTLSLSPGERATLSCRASQSVSSNYLAWYQQKSGQAPRLLIYGASTRATGIPDRFSGSGSGTDFTLTITRLEAEDFALYYCQQYGTSTFTFGGGTKVEIK

SEQ ID NO: 7217 - protein, 96 aa, Homo sapiens
EIVLTQSPGTLSLSPGERATLSCRASQSVSSNYLAWYQQQPGQAPRLLIFGASSRATGIPDRFSGSGSGTDFTLTISRLEPEDFAVYYCQQYGSSP

SEQ ID NO: 7218 - protein, 108 aa, Homo sapiens
EIVLTQSPGTLSLSPGERATLSCRASQSVSSNYLAWYQQQPGQAPRLLIFGASSRATGIPDRFSGSGSGTDFTLTISRLEPEDFAVYYCQQYGSSPQTFGQGTKVELK

SEQ ID NO: 7219 - protein, 95 aa, Homo sapiens
EIVLTQSPGTLSLSPGERATLSCRASQSVSSNYLSWYQQQPGQAPRVLIYGASNRATGIPDRFSGSGSGTEFTLTISRLEPEDVAVYYCQQYGSS

SEQ ID NO: 7220 - protein, 107 aa, Homo sapiens
EIVLTQSPGTLSLSPGERATLSCRASQSVSSNYLSWYQQQPGQAPRVLIYGASNRATGIPDRFSGSGSGTEFTLTISRLEPEDVAVYYCQQYGSSTLTFGGGTKVEI

SEQ ID NO: 7221 - protein, 96 aa, Homo sapiens
EIVLTQSPGTLSLSPGERATLSCRASQSVSSRYLAWYQQKPGQAPRLLIYGASSRASGIADRFSGSGSGTDFTLTISRLEPEDFAVYYCQQYGSSP

SEQ ID NO: 7222 - protein, 108 aa, Homo sapiens
EIVLTQSPGTLSLSPGERATLSCRASQSVSSRYLAWYQQKPGQAPRLLIYGASSRASGIADRFSGSGSGTDFTLTISRLEPEDFAVYYCQQYGSSPLTFGPGTKVDIK

SEQ ID NO: 7223 - protein, 96 aa, Homo sapiens
EIVLTQSPGTLSLSPGERATLSCRASQSVSSRYLAWYQQKRGQAPRLLIYGASSRATGIPDRFSGSGSGTEFTLTISRLEPEDFAVYYCQQYGSSP

SEQ ID NO: 7224 - protein, 108 aa, Homo sapiens
EIVLTQSPGTLSLSPGERATLSCRASQSVSSRYLAWYQQKRGQAPRLLIYGASSRATGIPDRFSGSGSGTEFTLTISRLEPEDFAVYYCQQYGSSPETFGQGTKVEIK

SEQ ID NO: 7225 - protein, 95 aa, Homo sapiens
EIVLTQSPGTLSLSPGERATLSCRASQSVSSSDLAWYQQTPGQAPRLLIYAGSSRATGTPDRFSGSGSGTEFTLTINRLEPEDFAIYYCQQYSTS

SEQ ID NO: 7226 - protein, 108 aa, Homo sapiens
EIVLTQSPGTLSLSPGERATLSCRASQSVSSSDLAWYQQTPGQAPRLLIYAGSSRATGTPDRFSGSGSGTEFTLTINRLEPEDFAIYYCQQYSTSILTFGGGTRVEIK

SEQ ID NO: 7227 - protein, 95 aa, Homo sapiens
EIVLTQSPGTLSLSPGERATLSCRASQSVSSSKLAWYQQKPGQAPRLLIYGASSRATGIPDRFSGSGSGTDFTLIISRLEPEDFAVYYCQQYGTS

SEQ ID NO: 7228 - protein, 107 aa, Homo sapiens
EIVLTQSPGTLSLSPGERATLSCRASQSVSSSKLAWYQQKPGQAPRLLIYGASSRATGIPDRFSGSGSGTDFTLIISRLEPEDFAVYYCQQYGTSKSFGQGTKVEIK

SEQ ID NO: 7229 - protein, 96 aa, Homo sapiens
EIVLTQSPGTLSLSPGERATLSCRASQSVSSSNLAWYQQKPGQAPRLLIHGASSRATGIPDRFSGSGSGTDFTLSISRLEPEDFAVYYCQQYGSSP

SEQ ID NO: 7230 - protein, 108 aa, Homo sapiens
EIVLTQSPGTLSLSPGERATLSCRASQSVSSSNLAWYQQKPGQAPRLLIHGASSRATGIPDRFSGSGSGTDFTLSISRLEPEDFAVYYCQQYGSSPFTFGPGTKVDIK

SEQ ID NO: 7231 - protein, 95 aa, Homo sapiens
EIVLTQSPGTLSLSPGERATLSCRASQSVSSSQLAWYQQKSGQAPRLLIYAASTRATGIPDRFSGSGSGTDFTLTISRLEAEDFALYYCQQYGSS

SEQ ID NO: 7232 - protein, 108 aa, Homo sapiens
EIVLTQSPGTLSLSPGERATLSCRASQSVSSSQLAWYQQKSGQAPRLLIYAASTRATGIPDRFSGSGSGTDFTLTISRLEAEDFALYYCQQYGSSTFTFGGGTKVEIK

SEQ ID NO: 7233 - protein, 95 aa, Homo sapiens
EIVLTQSPGTLSLSPGERATLSCRASQSVSSSSLAWYQQKSGQAPRLLIYGASTRATGIPDRFSGSGSGTDFTLTISRLEAEDFALYYCQQYASS

SEQ ID NO: 7234 - protein, 108 aa, Homo sapiens
EIVLTQSPGTLSLSPGERATLSCRASQSVSSSSLAWYQQKSGQAPRLLIYGASTRATGIPDRFSGSGSGTDFTLTISRLEAEDFALYYCQQYASSTFTFGGGTKVEIK

SEQ ID NO: 7235 - protein, 96 aa, Homo sapiens
EIVLTQSPGTLSLSPGERATLSCRASQSVSSSYFTWYQQKPGQAPRLLIYGTSSRATGIPDRFSGSGSGTDFTLTISRLEPEDFAVYYCQQYGSSP

SEQ ID NO: 7236 - protein, 108 aa, Homo sapiens
EIVLTQSPGTLSLSPGERATLSCRASQSVSSSYFTWYQQKPGQAPRLLIYGTSSRATGIPDRFSGSGSGTDFTLTISRLEPEDFAVYYCQQYGSSPLTFGGGTKVEIK

SEQ ID NO: 7237 - protein, 96 aa, Homo sapiens
EIVLTQSPGTLSLSPGERATLSCRASQSVSSSYLAWYQHKPGQSPRLLIYGASSRATGIPDRFSGSGSGTDFTLTISRLEPEDFAVYYCHQYGRSP

SEQ ID NO: 7238 - protein, 108 aa, Homo sapiens
EIVLTQSPGTLSLSPGERATLSCRASQSVSSSYLAWYQHKPGQSPRLLIYGASSRATGIPDRFSGSGSGTDFTLTISRLEPEDFAVYYCHQYGRSPWTFGQGTKVEIK

SEQ ID NO: 7239 - protein, 96 aa, Homo sapiens
EIVLTQSPGTLSLSPGERATLSCRASQSVSSSYLAWYQQKPGLAPRLLIYDASSRATGIPDRFSGSGSGIDFTFTISRLEPEDFALYYCQQYGTSP

SEQ ID NO: 7240 - protein, 108 aa, Homo sapiens
EIVLTQSPGTLSLSPGERATLSCRASQSVSSSYLAWYQQKPGLAPRLLIYDASSRATGIPDRFSGSGSGIDFTFTISRLEPEDFALYYCQQYGTSPWTFGQGTRVEIK

SEQ ID NO: 7241 - protein, 96 aa, Homo sapiens
EIVLTQSPGTLSLSPGERATLSCRASQSVSSSYLAWYQQKPGLAPRLLIYDASSRATGIPDRFSGSGSGTDFTLTISRLEPEDFAVYYCQQYGSSP

SEQ ID NO: 7242 - protein, 97 aa, Homo sapiens
EIVLTQSPGTLSLSPGERATLSCRASQSVSSSYLAWYQQKPGLAPRLLIYDASSRATGIPDRFSGSGSGTDFTLTISRLEPEDFAVYYCQQYGSSPP

SEQ ID NO: 7243 - protein, 109 aa, Homo sapiens
EIVLTQSPGTLSLSPGERATLSCRASQSVSSSYLAWYQQKPGLAPRLLIYDASSRATGIPDRFSGSGSGTDFTLTISRLEPEDFAVYYCQQYGSSPPWTFGQGTKVEIK

SEQ ID NO: 7244 - protein, 108 aa, Homo sapiens
EIVLTQSPGTLSLSPGERATLSCRASQSVSSSYLAWYQQKPGLAPRLLIYDASSRATGIPDRFSGSGSGTDFTLTISRLEPEDFAVYYCQQYGSSPWTFGQGTKVEIK

SEQ ID NO: 7245 - protein, 95 aa, Homo sapiens
EIVLTQSPGTLSLSPGERATLSCRASQSVSSSYLAWYQQKPGLAPRLLIYDASSRATGIPDRFSGSGSGTDFTLTISRLEPEDFAVYYCQQYGTS

SEQ ID NO: 7246 - protein, 109 aa, Homo sapiens
EIVLTQSPGTLSLSPGERATLSCRASQSVSSSYLAWYQQKPGLAPRLLIYDASSRATGIPDRFSGSGSGTDFTLTISRLEPEDFAVYYCQQYGTSSMYTFGQGTKLEIK

SEQ ID NO: 7247 - protein, 96 aa, Homo sapiens
EIVLTQSPGTLSLSPGERATLSCRASQSVSSSYLAWYQQKPGQAPRLLIYAASSRATGIPDRFSGSGSGTDFTLTISRLEPEDFAVYYCQQYGSSP

SEQ ID NO: 7248 - protein, 108 aa, Homo sapiens
EIVLTQSPGTLSLSPGERATLSCRASQSVSSSYLAWYQQKPGQAPRLLIYAASSRATGIPDRFSGSGSGTDFTLTISRLEPEDFAVYYCQQYGSSPRTFGQGTKVEIK

SEQ ID NO: 7249 - protein, 96 aa, Homo sapiens
EIVLTQSPGTLSLSPGERATLSCRASQSVSSSYLAWYQQKPGQAPRLLIYDASSRATGIPDRFSGSGSGTDFTLTISRLEPEDFALYYCQQYGTSP

SEQ ID NO: 7250 - protein, 108 aa, Homo sapiens
EIVLTQSPGTLSLSPGERATLSCRASQSVSSSYLAWYQQKPGQAPRLLIYDASSRATGIPDRFSGSGSGTDFTLTISRLEPEDFALYYCQQYGTSPRTFGQGTNVEIK

SEQ ID NO: 7251 - protein, 95 aa, Homo sapiens
EIVLTQSPGTLSLSPGERATLSCRASQSVSSSYLAWYQQKPGQAPRLLIYGASNRATGIPDRFSGSGSGTDFALTISRLEPEDFAVYYCQQFGSS

SEQ ID NO: 7252 - protein, 109 aa, Homo sapiens
EIVLTQSPGTLSLSPGERATLSCRASQSVSSSYLAWYQQKPGQAPRLLIYGASNRATGIPDRFSGSGSGTDFALTISRLEPEDFAVYYCQQFGSSRIYTFGQGTKLEIK

SEQ ID NO: 7253 - protein, 93 aa, Homo sapiens
EIVLTQSPGTLSLSPGERATLSCRASQSVSSSYLAWYQQKPGQAPRLLIYGASNRATGIPDRFSGSGSGTDFTLTISRLEPEDFAVYYCQQYG

SEQ ID NO: 7254 - protein, 105 aa, Homo sapiens
EIVLTQSPGTLSLSPGERATLSCRASQSVSSSYLAWYQQKPGQAPRLLIYGASNRATGIPDRFSGSGSGTDFTLTISRLEPEDFAVYYCQQYGRTFGQGTKVEIK

SEQ ID NO: 7255 - protein, 96 aa, Homo sapiens
EIVLTQSPGTLSLSPGERATLSCRASQSVSSSYLAWYQQKPGQAPRLLIYGASSRAAGIPDRFSGSGSGTDFTLTISRLEPEDFAVYNCQQYGSSP

SEQ ID NO: 7256 - protein, 108 aa, Homo sapiens
EIVLTQSPGTLSLSPGERATLSCRASQSVSSSYLAWYQQKPGQAPRLLIYGASSRAAGIPDRFSGSGSGTDFTLTISRLEPEDFAVYNCQQYGSSPYTFGQGTRLEIK

SEQ ID NO: 7257 - protein, 96 aa, Homo sapiens
EIVLTQSPGTLSLSPGERATLSCRASQSVSSSYLAWYQQKPGQAPRLLIYGASSRATGIPDRFSGSGSGTDFSLTISRLEPEDFAVYYCQQYSSSP

SEQ ID NO: 7258 - protein, 109 aa, Homo sapiens
EIVLTQSPGTLSLSPGERATLSCRASQSVSSSYLAWYQQKPGQAPRLLIYGASSRATGIPDRFSGSGSGTDFSLTISRLEPEDFAVYYCQQYSSSPMYTFGQGTKLEIK

SEQ ID NO: 7259 - protein, 96 aa, Homo sapiens
EIVLTQSPGTLSLSPGERATLSCRASQSVSSSYLAWYQQKPGQAPRLLIYGASSRATGIPDRFSGSGSGTDFTLTIRRLESEDFAVYYCQQYGSSP

SEQ ID NO: 7260 - protein, 107 aa, Homo sapiens
EIVLTQSPGTLSLSPGERATLSCRASQSVSSSYLAWYQQKPGQAPRLLIYGASSRATGIPDRFSGSGSGTDFTLTIRRLESEDFAVYYCQQYGSSPLTFGGGTKVEI

SEQ ID NO: 7261 - protein, 96 aa, Homo sapiens
EIVLTQSPGTLSLSPGERATLSCRASQSVSSSYLAWYQQKPGQAPRLLIYGASSRATGIPDRFSGSGSGTDFTLTISRLEPEDFAVYYCQQYGGSP

SEQ ID NO: 7262 - protein, 108 aa, Homo sapiens
EIVLTQSPGTLSLSPGERATLSCRASQSVSSSYLAWYQQKPGQAPRLLIYGASSRATGIPDRFSGSGSGTDFTLTISRLEPEDFAVYYCQQYGGSPITFGQGTRLEIK

SEQ ID NO: 7263 - protein, 95 aa, Homo sapiens
EIVLTQSPGTLSLSPGERATLSCRASQSVSSSYLAWYQQKPGQAPRLLIYGASSRATGIPDRFSGSGSGTDFTLTISRLEPEDFAVYYCQQYGSS

SEQ ID NO: 7264 - protein, 108 aa, Homo sapiens
EIVLTQSPGTLSLSPGERATLSCRASQSVSSSYLAWYQQKPGQAPRLLIYGASSRATGIPDRFSGSGSGTDFTLTISRLEPEDFAVYYCQQYGSSLLTFGGGTKVEIK

SEQ ID NO: 7265 - protein, 109 aa, Homo sapiens
EIVLTQSPGTLSLSPGERATLSCRASQSVSSSYLAWYQQKPGQAPRLLIYGASSRATGIPDRFSGSGSGTDFTLTISRLEPEDFAVYYCQQYGSSLTWTFGQGTKVEIK

SEQ ID NO: 7266 - protein, 108 aa, Homo sapiens
EIVLTQSPGTLSLSPGERATLSCRASQSVSSSYLAWYQQKPGQAPRLLIYGASSRATGIPDRFSGSGSGTDFTLTISRLEPEDFAVYYCQQYGSSLWTFGQGTKVEIK

SEQ ID NO: 7267 - protein, 108 aa, Homo sapiens
EIVLTQSPGTLSLSPGERATLSCRASQSVSSSYLAWYQQKPGQAPRLLIYGASSRATGIPDRFSGSGSGTDFTLTISRLEPEDFAVYYCQQYGSSLYTFGQGTKLEIK

SEQ ID NO: 7268 - protein, 96 aa, Homo sapiens
EIVLTQSPGTLSLSPGERATLSCRASQSVSSSYLAWYQQKPGQAPRLLIYGASSRATGIPDRFSGSGSGTDFTLTISRLEPEDFAVYYCQQYGSSP

SEQ ID NO: 7269 - protein, 108 aa, Homo sapiens
EIVLTQSPGTLSLSPGERATLSCRASQSVSSSYLAWYQQKPGQAPRLLIYGASSRATGIPDRFSGSGSGTDFTLTISRLEPEDFAVYYCQQYGSSPGTFGQGTKVEIK

SEQ ID NO: 7270 - protein, 107 aa, Homo sapiens
EIVLTQSPGTLSLSPGERATLSCRASQSVSSSYLAWYQQKPGQAPRLLIYGASSRATGIPDRFSGSGSGTDFTLTISRLEPEDFAVYYCQQYGSSPLFGGGTKVEIK

SEQ ID NO: 7271 - protein, 109 aa, Homo sapiens
EIVLTQSPGTLSLSPGERATLSCRASQSVSSSYLAWYQQKPGQAPRLLIYGASSRATGIPDRFSGSGSGTDFTLTISRLEPEDFAVYYCQQYGSSPLFTFGPGTKVDIK

SEQ ID NO: 7272 - protein, 108 aa, Homo sapiens
EIVLTQSPGTLSLSPGERATLSCRASQSVSSSYLAWYQQKPGQAPRLLIYGASSRATGIPDRFSGSGSGTDFTLTISRLEPEDFAVYYCQQYGSSPLIFGQGTKLEIK

SEQ ID NO: 7273 - protein, 108 aa, Homo sapiens
EIVLTQSPGTLSLSPGERATLSCRASQSVSSSYLAWYQQKPGQAPRLLIYGASSRATGIPDRFSGSGSGTDFTLTISRLEPEDFAVYYCQQYGSSPLTFGGGTKVEIK

SEQ ID NO: 7274 - protein, 108 aa, Homo sapiens
EIVLTQSPGTLSLSPGERATLSCRASQSVSSSYLAWYQQKPGQAPRLLIYGASSRATGIPDRFSGSGSGTDFTLTISRLEPEDFAVYYCQQYGSSPLTFGPGTKVDIK

SEQ ID NO: 7275 - protein, 97 aa, Homo sapiens
EIVLTQSPGTLSLSPGERATLSCRASQSVSSSYLAWYQQKPGQAPRLLIYGASSRATGIPDRFSGSGSGTDFTLTISRLEPEDFAVYYCQQYGSSPP

SEQ ID NO: 7276 - protein, 110 aa, Homo sapiens
EIVLTQSPGTLSLSPGERATLSCRASQSVSSSYLAWYQQKPGQAPRLLIYGASSRATGIPDRFSGSGSGTDFTLTISRLEPEDFAVYYCQQYGSSPPGYTFGQGTKLEIK

SEQ ID NO: 7277 - protein, 109 aa, Homo sapiens
EIVLTQSPGTLSLSPGERATLSCRASQSVSSSYLAWYQQKPGQAPRLLIYGASSRATGIPDRFSGSGSGTDFTLTISRLEPEDFAVYYCQQYGSSPPLTFGGGTKVEIK

SEQ ID NO: 7278 - protein, 108 aa, Homo sapiens
EIVLTQSPGTLSLSPGERATLSCRASQSVSSSYLAWYQQKPGQAPRLLIYGASSRATGIPDRFSGSGSGTDFTLTISRLEPEDFAVYYCQQYGSSPPTFGGGTKVEIK

SEQ ID NO: 7279 - protein, 109 aa, Homo sapiens
EIVLTQSPGTLSLSPGERATLSCRASQSVSSSYLAWYQQKPGQAPRLLIYGASSRATGIPDRFSGSGSGTDFTLTISRLEPEDFAVYYCQQYGSSPPWTFGQGTKVEIK

SEQ ID NO: 7280 - protein, 109 aa, Homo sapiens
EIVLTQSPGTLSLSPGERATLSCRASQSVSSSYLAWYQQKPGQAPRLLIYGASSRATGIPDRFSGSGSGTDFTLTISRLEPEDFAVYYCQQYGSSPPYTFGQGTKLEIK

SEQ ID NO: 7281 - protein, 109 aa, Homo sapiens
EIVLTQSPGTLSLSPGERATLSCRASQSVSSSYLAWYQQKPGQAPRLLIYGASSRATGIPDRFSGSGSGTDFTLTISRLEPEDFAVYYCQQYGSSPRFTFGPGTKVDIK

SEQ ID NO: 7282 - protein, 109 aa, Homo sapiens
EIVLTQSPGTLSLSPGERATLSCRASQSVSSSYLAWYQQKPGQAPRLLIYGASSRATGIPDRFSGSGSGTDFTLTISRLEPEDFAVYYCQQYGSSPRYTFGQGTKLEIK

SEQ ID NO: 7283 - protein, 107 aa, Homo sapiens
EIVLTQSPGTLSLSPGERATLSCRASQSVSSSYLAWYQQKPGQAPRLLIYGASSRATGIPDRFSGSGSGTDFTLTISRLEPEDFAVYYCQQYGSSPTFGQGTKVEIK

SEQ ID NO: 7284 - protein, 108 aa, Homo sapiens
EIVLTQSPGTLSLSPGERATLSCRASQSVSSSYLAWYQQKPGQAPRLLIYGASSRATGIPDRFSGSGSGTDFTLTISRLEPEDFAVYYCQQYGSSPVTFGQGTKLEIK

SEQ ID NO: 7285 - protein, 108 aa, Homo sapiens
EIVLTQSPGTLSLSPGERATLSCRASQSVSSSYLAWYQQKPGQAPRLLIYGASSRATGIPDRFSGSGSGTDFTLTISRLEPEDFAVYYCQQYGSSPVTFGQGTRLEIK

SEQ ID NO: 7286 - protein, 108 aa, Homo sapiens
EIVLTQSPGTLSLSPGERATLSCRASQSVSSSYLAWYQQKPGQAPRLLIYGASSRATGIPDRFSGSGSGTDFTLTISRLEPEDFAVYYCQQYGSSPWAFGQGTKVEIK

SEQ ID NO: 7287 - protein, 108 aa, Homo sapiens
EIVLTQSPGTLSLSPGERATLSCRASQSVSSSYLAWYQQKPGQAPRLLIYGASSRATGIPDRFSGSGSGTDFTLTISRLEPEDFAVYYCQQYGSSPWTFGQGTKVEIK

SEQ ID NO: 7288 - protein, 108 aa, Homo sapiens
EIVLTQSPGTLSLSPGERATLSCRASQSVSSSYLAWYQQKPGQAPRLLIYGASSRATGIPDRFSGSGSGTDFTLTISRLEPEDFAVYYCQQYGSSQYTFGQGTKLEIK

SEQ ID NO: 7289 - protein, 108 aa, Homo sapiens
EIVLTQSPGTLSLSPGERATLSCRASQSVSSSYLAWYQQKPGQAPRLLIYGASSRATGIPDRFSGSGSGTDFTLTISRLEPEDFAVYYCQQYGSSRRTFGQGTKVEIK

SEQ ID NO: 7290 - protein, 107 aa, Homo sapiens
EIVLTQSPGTLSLSPGERATLSCRASQSVSSSYLAWYQQKPGQAPRLLIYGASSRATGIPDRFSGSGSGTDFTLTISRLEPEDFAVYYCQQYGSSRTFGQGTKVEIK

SEQ ID NO: 7291 - protein, 108 aa, Homo sapiens
EIVLTQSPGTLSLSPGERATLSCRASQSVSSSYLAWYQQKPGQAPRLLIYGASSRATGIPDRFSGSGSGTDFTLTISRLEPEDFAVYYCQQYGSSSVTFGQGTKVEIK

SEQ ID NO: 7292 - protein, 108 aa, Homo sapiens
EIVLTQSPGTLSLSPGERATLSCRASQSVSSSYLAWYQQKPGQAPRLLIYGASSRATGIPDRFSGSGSGTDFTLTISRLEPEDFAVYYCQQYGSSVWTFGQGTKVEIK

SEQ ID NO: 7293 - protein, 96 aa, Homo sapiens
EIVLTQSPGTLSLSPGERATLSCRASQSVSSSYLAWYQQKPGQAPRLLIYGASSRATGVPDRFSGSGSGTDFTLTIKRLQPEDFAVYFCQQYGSSP

SEQ ID NO: 7294 - protein, 108 aa, Homo sapiens
EIVLTQSPGTLSLSPGERATLSCRASQSVSSSYLAWYQQKPGQAPRLLIYGASSRATGVPDRFSGSGSGTDFTLTIKRLQPEDFAVYFCQQYGSSPLTFGQGTKVEIK

SEQ ID NO: 7295 - protein, 95 aa, Homo sapiens
EIVLTQSPGTLSLSPGERATLSCRASQSVSSSYLAWYQQKPGQAPRLLIYGASTRATGIPDRFSGSGSGTDFTLTISRLEPEDFAVYSCQQYGSS

SEQ ID NO: 7296 - protein, 108 aa, Homo sapiens
EIVLTQSPGTLSLSPGERATLSCRASQSVSSSYLAWYQQKPGQAPRLLIYGASTRATGIPDRFSGSGSGTDFTLTISRLEPEDFAVYSCQQYGSSTFTFGGGTKVEIK

SEQ ID NO: 7297 - protein, 96 aa, Homo sapiens
EIVLTQSPGTLSLSPGERATLSCRASQSVSSSYLAWYQQKPGQAPRLLMYGASSRATGIPDRFSGSGSGTDFTLTISGLEPEDFAVYYCQQYGSSP

SEQ ID NO: 7298 - protein, 109 aa, Homo sapiens
EIVLTQSPGTLSLSPGERATLSCRASQSVSSSYLAWYQQKPGQAPRLLMYGASSRATGIPDRFSGSGSGTDFTLTISGLEPEDFAVYYCQQYGSSPQLTFGGGTKVEIK

SEQ ID NO: 7299 - protein, 96 aa, Homo sapiens
EIVLTQSPGTLSLSPGERATLSCRASQSVSSSYLAWYQQKPGQPPRLLISGASSRATGIPDRFSGSGSGTDFTLTISRLEPEDFAVYYCQQYGNSP

SEQ ID NO: 7300 - protein, 108 aa, Homo sapiens
EIVLTQSPGTLSLSPGERATLSCRASQSVSSSYLAWYQQKPGQPPRLLISGASSRATGIPDRFSGSGSGTDFTLTISRLEPEDFAVYYCQQYGNSPRTFGQGTKVEIK

SEQ ID NO: 7301 - protein, 95 aa, Homo sapiens
EIVLTQSPGTLSLSPGERATLSCRASQSVSSSYLAWYQQKPGQTPRLLIYGASSRATGIPDRFSGSGSETEFTLTISRVEPEDFAVYYCQQYGSS

SEQ ID NO: 7302 - protein, 108 aa, Homo sapiens
EIVLTQSPGTLSLSPGERATLSCRASQSVSSSYLAWYQQKPGQTPRLLIYGASSRATGIPDRFSGSGSETEFTLTISRVEPEDFAVYYCQQYGSSTLTFGGGTKVEIK

SEQ ID NO: 7303 - protein, 95 aa, Homo sapiens
EIVLTQSPGTLSLSPGERATLSCRASQSVSSSYLAWYQQKPGQTPRLLIYGASSRATGIPDRFSGSGSGTEFTLTISRLEPEDFAVYYCQQYGSS

SEQ ID NO: 7304 - protein, 108 aa, Homo sapiens
EIVLTQSPGTLSLSPGERATLSCRASQSVSSSYLAWYQQKPGQTPRLLIYGASSRATGIPDRFSGSGSGTEFTLTISRLEPEDFAVYYCQQYGSSSLTFGGGTKVEIK

SEQ ID NO: 7305 - protein, 95 aa, Homo sapiens
EIVLTQSPGTLSLSPGERATLSCRASQSVSSSYLGWYQQKPGQAPRLLIYGASSRATGIPDRFSGSGSGTDFTLTISRLEPEDFAVYYCQQYGTL

SEQ ID NO: 7306 - protein, 108 aa, Homo sapiens
EIVLTQSPGTLSLSPGERATLSCRASQSVSSSYLGWYQQKPGQAPRLLIYGASSRATGIPDRFSGSGSGTDFTLTISRLEPEDFAVYYCQQYGTLQLTFGGGTKVEIK

SEQ ID NO: 7307 - protein, 96 aa, Homo sapiens
EIVLTQSPGTLSLSPGERATLSCRASQSVSSTYLAWYQQRPGQAPRLLIYGVSSRATGVPDRFSGGGSGTDFTLTISRLEPEDFAVYYCQHYGSSP

SEQ ID NO: 7308 - protein, 109 aa, Homo sapiens
EIVLTQSPGTLSLSPGERATLSCRASQSVSSTYLAWYQQRPGQAPRLLIYGVSSRATGVPDRFSGGGSGTDFTLTISRLEPEDFAVYYCQHYGSSPGYTFGQGTKLEIK

SEQ ID NO: 7309 - protein, 95 aa, Homo sapiens
EIVLTQSPGTLSLSPGERATLSCRASQSVSTNYLAWYQQKLGQAPRLLIYGASSRATGIPDRFSGSGSGTDFTLTITRLEPEDFAVYYCQQYGTS

SEQ ID NO: 7310 - protein, 108 aa, Homo sapiens
EIVLTQSPGTLSLSPGERATLSCRASQSVSTNYLAWYQQKLGQAPRLLIYGASSRATGIPDRFSGSGSGTDFTLTITRLEPEDFAVYYCQQYGTSQNTFGQGTKLEIK

SEQ ID NO: 7311 - protein, 95 aa, Homo sapiens
EIVLTQSPGTLSLSPGERATLSCRASQSVSTNYLAWYQQKPGLAPRLLIYDASTRVTGIPDRFSGSGSGTDFTLTISRLEPEDFAVYYCQQYGSS

SEQ ID NO: 7312 - protein, 108 aa, Homo sapiens
EIVLTQSPGTLSLSPGERATLSCRASQSVSTNYLAWYQQKPGLAPRLLIYDASTRVTGIPDRFSGSGSGTDFTLTISRLEPEDFAVYYCQQYGSSLYTFGQGTKLEIK

SEQ ID NO: 7313 - protein, 96 aa, Homo sapiens
EIVLTQSPGTLSLSPGERATLSCRASQSVTNNYLAWYQQRPGQSPRLLIYGASSRATGIPDRFSGSGSGTDFTLTISRLEPEDFAVYYCQQYGASP

SEQ ID NO: 7314 - protein, 109 aa, Homo sapiens
EIVLTQSPGTLSLSPGERATLSCRASQSVTNNYLAWYQQRPGQSPRLLIYGASSRATGIPDRFSGSGSGTDFTLTISRLEPEDFAVYYCQQYGASPMYTFGRGTKLDIK

SEQ ID NO: 7315 - protein, 95 aa, Homo sapiens
EIVLTQSPGTLSLSPGERATLSCRASQSVTRNNFVWFQQKPGQAPRLLIYGASSRATGIPDRFSGSGSGTDFTLSISRLEPEDFAVYYCQQYGSS

SEQ ID NO: 7316 - protein, 108 aa, Homo sapiens
EIVLTQSPGTLSLSPGERATLSCRASQSVTRNNFVWFQQKPGQAPRLLIYGASSRATGIPDRFSGSGSGTDFTLSISRLEPEDFAVYYCQQYGSSVWTFGQGTKVEIK

SEQ ID NO: 7317 - protein, 96 aa, Homo sapiens
EIVLTQSPGTLSLSPGERATLSCRASQSVTSNSLAWYQQKSGQAPRLLIYGASNRATGIPDRFSGSGSGTDFTLTISRLEPEDFAVYFCQQYGNSP

SEQ ID NO: 7318 - protein, 108 aa, Homo sapiens
EIVLTQSPGTLSLSPGERATLSCRASQSVTSNSLAWYQQKSGQAPRLLIYGASNRATGIPDRFSGSGSGTDFTLTISRLEPEDFAVYFCQQYGNSPGTFGRGTKVDIK

SEQ ID NO: 7319 - protein, 96 aa, Homo sapiens
EIVLTQSPGTLSLSPGERATLSCRASQSVTSNSVAWYQQKPGQAPRLLIYGASSRATGIPDRFSGSGSGTDFTLTISRLEPEDFAVYSCQQYGTSP

SEQ ID NO: 7320 - protein, 108 aa, Homo sapiens
EIVLTQSPGTLSLSPGERATLSCRASQSVTSNSVAWYQQKPGQAPRLLIYGASSRATGIPDRFSGSGSGTDFTLTISRLEPEDFAVYSCQQYGTSPGTFGQGTKVEIK

SEQ ID NO: 7321 - protein, 94 aa, Homo sapiens
EIVLTQSPGTLSLSPGERATLSCRASQSVTSNYLAWYQQIPGQAPRLLIYGASNRATGIPDRFSGSGSGTDFTLTISRLEPEDFAVYYCQQYGS

SEQ ID NO: 7322 - protein, 106 aa, Homo sapiens
EIVLTQSPGTLSLSPGERATLSCRASQSVTSNYLAWYQQIPGQAPRLLIYGASNRATGIPDRFSGSGSGTDFTLTISRLEPEDFAVYYCQQYGSQTFGQGTRLEIK

SEQ ID NO: 7323 - protein, 96 aa, Homo sapiens
EIVLTQSPGTLSLSPGERATLSCRASQSVTSSYLAWYQQKPGQAPRLLIYGASSRATGIPDRFSGSGSGTDFTLTITRLEAEDFAVYYCQQYGSSP

SEQ ID NO: 7324 - protein, 108 aa, Homo sapiens
EIVLTQSPGTLSLSPGERATLSCRASQSVTSSYLAWYQQKPGQAPRLLIYGASSRATGIPDRFSGSGSGTDFTLTITRLEAEDFAVYYCQQYGSSPLTFGGGTKVEIK

SEQ ID NO: 7325 - protein, 95 aa, Homo sapiens
EIVLTQSPGTLSLSPGERATLSCRASQSVTSYLAWYQQKPGQAPRLLIYGASSRATGIPDRFSGSGSGTDFTLSISRLEPEDFAVYYCQQYGSSP

SEQ ID NO: 7326 - protein, 107 aa, Homo sapiens
EIVLTQSPGTLSLSPGERATLSCRASQSVTSYLAWYQQKPGQAPRLLIYGASSRATGIPDRFSGSGSGTDFTLSISRLEPEDFAVYYCQQYGSSPFTFGQGTRLEIK

SEQ ID NO: 7327 - protein, 96 aa, Homo sapiens
EIVLTQSPGTLSLSPGERATLSCRASQTINRKYLAWYQQKPGQAPRLLIYAASSRATGIPDRFSGSGSGTDFTLTISRLEPEDFALYYCQQYGSSP

SEQ ID NO: 7328 - protein, 108 aa, Homo sapiens
EIVLTQSPGTLSLSPGERATLSCRASQTINRKYLAWYQQKPGQAPRLLIYAASSRATGIPDRFSGSGSGTDFTLTISRLEPEDFALYYCQQYGSSPYTFGQGTKLEIK

SEQ ID NO: 7329 - protein, 96 aa, Homo sapiens
EIVLTQSPGTLSLSPGERATLSCRASQTVSSSHLAWYQQRPGLAPRLLIYDASSRATGIPDRFSGSGSGTDFTLTISRLEPEDFAVYYCQQYGSSS

SEQ ID NO: 7330 - protein, 108 aa, Homo sapiens
EIVLTQSPGTLSLSPGERATLSCRASQTVSSSHLAWYQQRPGLAPRLLIYDASSRATGIPDRFSGSGSGTDFTLTISRLEPEDFAVYYCQQYGSSSLTFGGGTNVEIK

SEQ ID NO: 7331 - protein, 96 aa, Homo sapiens
EIVLTQSPGTLSLSPGERATLSCRASQTVSSSYLAWYQQKPGQAPRLLIYDASSRATGIPDRFSGSGSGTDFTLTISRLEPEDFAVYYCQQYGSSS

SEQ ID NO: 7332 - protein, 108 aa, Homo sapiens
EIVLTQSPGTLSLSPGERATLSCRASQTVSSSYLAWYQQKPGQAPRLLIYDASSRATGIPDRFSGSGSGTDFTLTISRLEPEDFAVYYCQQYGSSSLTFGGGTKVEIK

SEQ ID NO: 7333 - protein, 95 aa, Homo sapiens
EIVLTQSPGTLSLSPGERATLSCRASQTVSSSYLAWYQQKRGQAPRLLIYGASSRATGIPDRFSGSGSGTDFTLTISRLEPEDFAVYYCQQYGSS

SEQ ID NO: 7334 - protein, 108 aa, Homo sapiens
EIVLTQSPGTLSLSPGERATLSCRASQTVSSSYLAWYQQKRGQAPRLLIYGASSRATGIPDRFSGSGSGTDFTLTISRLEPEDFAVYYCQQYGSSGLTFGGGTKVEIK

SEQ ID NO: 7335 - protein, 96 aa, Homo sapiens
EIVLTQSPGTLSLSPGERATLSCRSSQSVRSSYLAWYQQKPGQAPRLLIYGASSRATGIPDRFSGSGSGTDFTLTISRLEPEDFAVYYCQQYGGSP

SEQ ID NO: 7336 - protein, 109 aa, Homo sapiens
EIVLTQSPGTLSLSPGERATLSCRSSQSVRSSYLAWYQQKPGQAPRLLIYGASSRATGIPDRFSGSGSGTDFTLTISRLEPEDFAVYYCQQYGGSPRITFGQGTRLEIK

SEQ ID NO: 7337 - protein, 96 aa, Homo sapiens
EIVLTQSPGTLSLSPGERATLSCRTSQSISSTYLAWYQQQPGQAPILLIYGASTRATGIPDRFSGSGSGTDFTLTISRLEPEDFAVYYCQQYGNSP

SEQ ID NO: 7338 - protein, 109 aa, Homo sapiens
EIVLTQSPGTLSLSPGERATLSCRTSQSISSTYLAWYQQQPGQAPILLIYGASTRATGIPDRFSGSGSGTDFTLTISRLEPEDFAVYYCQQYGNSPRVTFGQGTKVEIK

SEQ ID NO: 7339 - protein, 96 aa, Homo sapiens
EIVLTQSPGTLSLSPGERGTLSCRASQSVNSNNLAWYQQKHGQAPRLLIYGASSRATGIPDRFSGSGSGTDFTLTISRLEPEDFAVYYCQQYGSSP

SEQ ID NO: 7340 - protein, 108 aa, Homo sapiens
EIVLTQSPGTLSLSPGERGTLSCRASQSVNSNNLAWYQQKHGQAPRLLIYGASSRATGIPDRFSGSGSGTDFTLTISRLEPEDFAVYYCQQYGSSPFTFGPGTNVDIK

SEQ ID NO: 7341 - protein, 95 aa, Homo sapiens
EIVLTQSPGTLSLSPGERGTLSCRASQSVSSNYLAWYQQKPGQAPRLLIYGASSRATGIPDRFSGSGSGTDFTLSISRLEPEDLAVYYCQQYGSS

SEQ ID NO: 7342 - protein, 108 aa, Homo sapiens
EIVLTQSPGTLSLSPGERGTLSCRASQSVSSNYLAWYQQKPGQAPRLLIYGASSRATGIPDRFSGSGSGTDFTLSISRLEPEDLAVYYCQQYGSSSTTFGQGTKVEIK

SEQ ID NO: 7343 - protein, 95 aa, Homo sapiens
EIVLTQSPGTLSLSPGERVPLSCRASQSVSSFLAWYQQKPGLAPRLLIYDASSRATGIPDRFSGSGSGTDFTLTISRLEPEDFAVYYCQQYGSSP

SEQ ID NO: 7344 - protein, 107 aa, Homo sapiens
EIVLTQSPGTLSLSPGERVPLSCRASQSVSSFLAWYQQKPGLAPRLLIYDASSRATGIPDRFSGSGSGTDFTLTISRLEPEDFAVYYCQQYGSSPITFGQGTRLEIK

SEQ ID NO: 7345 - protein, 95 aa, Homo sapiens
EIVLTQSPGTLSLSPGERVTLSCRASQSISSNQLAWYQQKSGQAPRLLIYGASTRATGIPDRFSGSGSGTDFTLTINRLEAEDFALYYCQQYDSS

SEQ ID NO: 7346 - protein, 108 aa, Homo sapiens
EIVLTQSPGTLSLSPGERVTLSCRASQSISSNQLAWYQQKSGQAPRLLIYGASTRATGIPDRFSGSGSGTDFTLTINRLEAEDFALYYCQQYDSSTFTFGGGTKVEIK

SEQ ID NO: 7347 - protein, 96 aa, Homo sapiens
EIVLTQSPGTLSLSPGERVTLSCRASQSVNSNSLAWYQQKPGQVPRLLIYGAFTRATAIPDRFSGSGSGTDFTLTINRLEPEDFAVYYCQQYGSSP

SEQ ID NO: 7348 - protein, 108 aa, Homo sapiens
EIVLTQSPGTLSLSPGERVTLSCRASQSVNSNSLAWYQQKPGQVPRLLIYGAFTRATAIPDRFSGSGSGTDFTLTINRLEPEDFAVYYCQQYGSSPLTFGGGTKVEIK

SEQ ID NO: 7349 - protein, 96 aa, Homo sapiens
EIVLTQSPGTLSLSPGERVTLSCRASQSVRSNSVAWYQQKPGQAPRLLIYGATSRATGIPDRFSGSGSGTDFTLTISRLEPEDFAVYYCHQYGGSP

SEQ ID NO: 7350 - protein, 107 aa, Homo sapiens
EIVLTQSPGTLSLSPGERVTLSCRASQSVRSNSVAWYQQKPGQAPRLLIYGATSRATGIPDRFSGSGSGTDFTLTISRLEPEDFAVYYCHQYGGSPNTFGQGTKLDI

SEQ ID NO: 7351 - protein, 95 aa, Homo sapiens
EIVLTQSPGTLSLSPGERVTLSCRASQSVSSNHVAWYQQKSGQAPRLLIYGASTRATGIPDRFSGSGSGTDFTLTINRLEAEDFALYYCQQYDSS

SEQ ID NO: 7352 - protein, 108 aa, Homo sapiens
EIVLTQSPGTLSLSPGERVTLSCRASQSVSSNHVAWYQQKSGQAPRLLIYGASTRATGIPDRFSGSGSGTDFTLTINRLEAEDFALYYCQQYDSSTFTFGGGTKVEIK

SEQ ID NO: 7353 - protein, 96 aa, Homo sapiens
EIVLTQSPGTLSLSPGERVTLSCRASQSVSSNYLAWYQQRPGQAPRLLVYGASSRATGIPDRFSGSGSGTDFTLTITRLEPEDFAVYYCQQYGSSP

SEQ ID NO: 7354 - protein, 108 aa, Homo sapiens
EIVLTQSPGTLSLSPGERVTLSCRASQSVSSNYLAWYQQRPGQAPRLLVYGASSRATGIPDRFSGSGSGTDFTLTITRLEPEDFAVYYCQQYGSSPSTFGQGTRLEIK

SEQ ID NO: 7355 - protein, 96 aa, Homo sapiens
EIVLTQSPGTLSLSPGERVTLSCRASQSVSSRYLAWYQQKPGQAPRLLIYGASSRATGIPDRFSGSGSGTDFTLTINRLEPEDFAVYYCQQYGNSP

SEQ ID NO: 7356 - protein, 108 aa, Homo sapiens
EIVLTQSPGTLSLSPGERVTLSCRASQSVSSRYLAWYQQKPGQAPRLLIYGASSRATGIPDRFSGSGSGTDFTLTINRLEPEDFAVYYCQQYGNSPLTFGGGTKVEIK

SEQ ID NO: 7357 - protein, 96 aa, Homo sapiens
EIVLTQSPGTLSLSPGESATLSCRASQSVTSNYLAWYQQKVGQAPRLLISGASSRATGIPDRFSGSGSETDFTLTISRLEPEDFAVYYCQQYGSSP

SEQ ID NO: 7358 - protein, 108 aa, Homo sapiens
EIVLTQSPGTLSLSPGESATLSCRASQSVTSNYLAWYQQKVGQAPRLLISGASSRATGIPDRFSGSGSETDFTLTISRLEPEDFAVYYCQQYGSSPLTFGGGTKVEIK

SEQ ID NO: 7359 - protein, 96 aa, Homo sapiens
EIVLTQSPGTLSLSPGETASLSCRASQSVSSSYLAWYQQKPGQAPRLLIYDASSRAAGIPDRFSGSGSGTDFTLIISRLEPEDFAVYFCQQYGSSP

SEQ ID NO: 7360 - protein, 108 aa, Homo sapiens
EIVLTQSPGTLSLSPGETASLSCRASQSVSSSYLAWYQQKPGQAPRLLIYDASSRAAGIPDRFSGSGSGTDFTLIISRLEPEDFAVYFCQQYGSSPWTFGQGTKVEIK

SEQ ID NO: 7361 - protein, 96 aa, Homo sapiens
EIVLTQSPGTLSLSPGGSATLSCRASQSVDNNYLAWYQHKPGQAPRLLIYDASSRATGIPDRFSGSGSGTDFTLTIRRLEPEDFAVYYCQHYGRSP

SEQ ID NO: 7362 - protein, 109 aa, Homo sapiens
EIVLTQSPGTLSLSPGGSATLSCRASQSVDNNYLAWYQHKPGQAPRLLIYDASSRATGIPDRFSGSGSGTDFTLTIRRLEPEDFAVYYCQHYGRSPRWTFGQGTKVEIK

SEQ ID NO: 7363 - protein, 95 aa, Homo sapiens
EIVLTQSPGTLSLSPGQRATLSCRASQSVNGNCLVWYQQKPDQTPRLLIYGASRRATGIPDRFSGSGSGTDFTLTINRLEPDDFAVYYCQHYADS

SEQ ID NO: 7364 - protein, 107 aa, Homo sapiens
EIVLTQSPGTLSLSPGQRATLSCRASQSVNGNCLVWYQQKPDQTPRLLIYGASRRATGIPDRFSGSGSGTDFTLTINRLEPDDFAVYYCQHYADSVWTFGQGTKVEV

SEQ ID NO: 7365 - protein, 96 aa, Homo sapiens
EIVLTQSPGTLSLSPGTRATLSCRASQSIRSNYLAWYQQKPGQTPRLLIYGASSRATGIPDRFSGSGSGTDYTLTISRLEPEDFAVYYCQQYGSSP

SEQ ID NO: 7366 - protein, 107 aa, Homo sapiens
EIVLTQSPGTLSLSPGTRATLSCRASQSIRSNYLAWYQQKPGQTPRLLIYGASSRATGIPDRFSGSGSGTDYTLTISRLEPEDFAVYYCQQYGSSPGTFGQGTKVEI

SEQ ID NO: 7367 - protein, 96 aa, Homo sapiens
EIVLTQSPGTLSLSVGARATLSCRTSQSIKNNNLAWYQQKPGQTPRLLIYGASNRAPGIPDRFSGSGSGTDYTLTISRLETEDFAVYYCQQYGSSP

SEQ ID NO: 7368 - protein, 105 aa, Homo sapiens
EIVLTQSPGTLSLSVGARATLSCRTSQSIKNNNLAWYQQKPGQTPRLLIYGASNRAPGIPDRFSGSGSGTDYTLTISRLETEDFAVYYCQQYGSSPGTFGQGTKV

SEQ ID NO: 7369 - protein, 95 aa, Homo sapiens
EIVLTQSPGTLSLTPGERATLSCRASQSVSSRSLAWYQQKPGQAPRLLIYDATTRATGIPDRFSGSGSGTDFTLTISRLEPEDFAVYYCQQYGDS

SEQ ID NO: 7370 - protein, 109 aa, Homo sapiens
EIVLTQSPGTLSLTPGERATLSCRASQSVSSRSLAWYQQKPGQAPRLLIYDATTRATGIPDRFSGSGSGTDFTLTISRLEPEDFAVYYCQQYGDSLSLTFGPGTTVDSK

SEQ ID NO: 7371 - protein, 96 aa, Homo sapiens
EIVLTQSPGTLSMSPGTRATLSCRASQSIRNNFLAWYQQKPGQTPRLLIYGASTRATGIPDRFSGSGSGTDYTLTISSLEPEDFAVYYCQQYGSSP

SEQ ID NO: 7372 - protein, 105 aa, Homo sapiens
EIVLTQSPGTLSMSPGTRATLSCRASQSIRNNFLAWYQQKPGQTPRLLIYGASTRATGIPDRFSGSGSGTDYTLTISSLEPEDFAVYYCQQYGSSPGTFGQGTKV

SEQ ID NO: 7373 - protein, 96 aa, Homo sapiens
EIVLTQSPGTLSSSPGERATLSCRASESVSTNSLAWYQQKPGQAPRLLLFGTFIRASGIPDRFSGSGSGTDFTLTINRLEPEDFAVYYCQQCGTSP

SEQ ID NO: 7374 - protein, 108 aa, Homo sapiens
EIVLTQSPGTLSSSPGERATLSCRASESVSTNSLAWYQQKPGQAPRLLLFGTFIRASGIPDRFSGSGSGTDFTLTINRLEPEDFAVYYCQQCGTSPRTFGQGTKVEIK

SEQ ID NO: 7375 - protein, 95 aa, Homo sapiens
EIVLTQSPGTLSVSPGERVTLSCRASQSVRSNYLAWYQQRLGQAPRLLIYGASTRATGIPDRFSGSGSGTDFTLTISTLEPEDFAVYYCQQYDSS

SEQ ID NO: 7376 - protein, 107 aa, Homo sapiens
EIVLTQSPGTLSVSPGERVTLSCRASQSVRSNYLAWYQQRLGQAPRLLIYGASTRATGIPDRFSGSGSGTDFTLTISTLEPEDFAVYYCQQYDSSVTFGQGTKVEIK

SEQ ID NO: 7377 - protein, 95 aa, Homo sapiens
EIVLTQSPGTLSVSPGERVTLSCRASQSVRSNYLAWYQQRLGQAPRLLIYGASTRATGIPDRFSGSGSGTDFTLTISTLEPEDFAVYYCQQYGSS

SEQ ID NO: 7378 - protein, 107 aa, Homo sapiens
EIVLTQSPGTLSVSPGERVTLSCRASQSVRSNYLAWYQQRLGQAPRLLIYGASTRATGIPDRFSGSGSGTDFTLTISTLEPEDFAVYYCQQYGSSVTFGQGTKVEIK

SEQ ID NO: 7379 - protein, 96 aa, Homo sapiens
EIVLTQSPGTLSVSPGTRATLSCRASQSVKSNSLAWYQQRPGQSPRLLIYDTSKRAAGIPDRFSGSGSGTDFTLSISGVEPEDFALYYCQQYGSSP

SEQ ID NO: 7380 - protein, 108 aa, Homo sapiens
EIVLTQSPGTLSVSPGTRATLSCRASQSVKSNSLAWYQQRPGQSPRLLIYDTSKRAAGIPDRFSGSGSGTDFTLSISGVEPEDFALYYCQQYGSSPGTFGPGTKVDIK

SEQ ID NO: 7381 - protein, 96 aa, Homo sapiens
EIVLTQSPGTVSLSPGERATLSCRASQSVANNYLAWYQQRLGLAPRLLIYGASSRATGIPDRFSGSGSGTDFTLTITRLEPEDFAVYYCQQYGRSP

SEQ ID NO: 7382 - protein, 108 aa, Homo sapiens
EIVLTQSPGTVSLSPGERATLSCRASQSVANNYLAWYQQRLGLAPRLLIYGASSRATGIPDRFSGSGSGTDFTLTITRLEPEDFAVYYCQQYGRSPLTFGGGTKVEFK

SEQ ID NO: 7383 - protein, 96 aa, Homo sapiens
EIVLTQSPPTLSLSPGERATLSCRASQSISNSLAWYQQKPGQAPRLLIYDASNRATGIPARFSGSGFGTDFTLTISSLEPEDCAVYYCQQRNNWPP

SEQ ID NO: 7384 - protein, 108 aa, Homo sapiens
EIVLTQSPPTLSLSPGERATLSCRASQSISNSLAWYQQKPGQAPRLLIYDASNRATGIPARFSGSGFGTDFTLTISSLEPEDCAVYYCQQRNNWPPLTFGGGTKVEIK

SEQ ID NO: 7385 - protein, 96 aa, Homo sapiens
EIVLTQSPRILSLSPGDRATLSCRASQTLGGSNLAWYQQKPGLAPRLLIYDVSTRATGIPDRFSGRGSGTDFTLTISRLEPEDFALYYCQQYASSS

SEQ ID NO: 7386 - protein, 107 aa, Homo sapiens
EIVLTQSPRILSLSPGDRATLSCRASQTLGGSNLAWYQQKPGLAPRLLIYDVSTRATGIPDRFSGRGSGTDFTLTISRLEPEDFALYYCQQYASSSSFGQGTTVEIK

SEQ ID NO: 7387 - protein, 96 aa, Homo sapiens
EIVLTQSPVRLSLSPGERATLFCRASQSVNVRDLVWYQHRPGQAPRLLIYGASKRASGIPDRFTGSGSGTDFTLSINSLEPEDFAIYYCQQYGTSP

SEQ ID NO: 7388 - protein, 107 aa, Homo sapiens
EIVLTQSPVRLSLSPGERATLFCRASQSVNVRDLVWYQHRPGQAPRLLIYGASKRASGIPDRFTGSGSGTDFTLSINSLEPEDFAIYYCQQYGTSPTLGQGTNVEMK

SEQ ID NO: 7389 - protein, 96 aa, Homo sapiens
EIVLTQSPVTLALSPGERATLSCRASQSISVSLAWYQQKPGQAPRLLIYGASTRATGIPARFSGSGSGTDFTLTISSLEPEDFAVYYCQQRYNWPP

SEQ ID NO: 7390 - protein, 108 aa, Homo sapiens
EIVLTQSPVTLALSPGERATLSCRASQSISVSLAWYQQKPGQAPRLLIYGASTRATGIPARFSGSGSGTDFTLTISSLEPEDFAVYYCQQRYNWPPITFGQGTRLEIK

SEQ ID NO: 7391 - protein, 96 aa, Homo sapiens
EIVLTQSPVTLSLSPGERATLSCGASQSVSSNYLAWYQQKPGLAPRLLIYDASNRATGIPDRFSGSGSGTDFTLTISTLEPEDFAVYYCQQYGSSP

SEQ ID NO: 7392 - protein, 108 aa, Homo sapiens
EIVLTQSPVTLSLSPGERATLSCGASQSVSSNYLAWYQQKPGLAPRLLIYDASNRATGIPDRFSGSGSGTDFTLTISTLEPEDFAVYYCQQYGSSPRTFGPGTKVEIK

SEQ ID NO: 7393 - protein, 96 aa, Homo sapiens
EIVLTQSPVTLSLSPGERATLSCRASESVSSHYLAWFQQKPGQAPRLLISATSSRATGTPDRFSATGSGADFTLTITRLEPEDFAVYYCQLYGASP

SEQ ID NO: 7394 - protein, 109 aa, Homo sapiens
EIVLTQSPVTLSLSPGERATLSCRASESVSSHYLAWFQQKPGQAPRLLISATSSRATGTPDRFSATGSGADFTLTITRLEPEDFAVYYCQLYGASPGRTFGQGTKVDFK

SEQ ID NO: 7395 - protein, 96 aa, Homo sapiens
EIVLTQSPVTLSLSPGERATLSCRASQSINNFLAWYQQKPGQAPRLLIYDASKRATGIPARFSGSGSATDFTLTISSLEPEDFAIYYCQQRSNWPP

SEQ ID NO: 7396 - protein, 107 aa, Homo sapiens
EIVLTQSPVTLSLSPGERATLSCRASQSINNFLAWYQQKPGQAPRLLIYDASKRATGIPARFSGSGSATDFTLTISSLEPEDFAIYYCQQRSNWPPITFGQGTRLEI

SEQ ID NO: 7397 - protein, 96 aa, Homo sapiens
EIVLTQSPVTLSLSPGERATLSCRASQSISSFLAWYQQRLGQPPRLLIFDASHRATGVPARFSGSGSGTDFTLTISSLEPEDSAVYYCQQRSNWPP

SEQ ID NO: 7398 - protein, 109 aa, Homo sapiens
EIVLTQSPVTLSLSPGERATLSCRASQSISSFLAWYQQRLGQPPRLLIFDASHRATGVPARFSGSGSGTDFTLTISSLEPEDSAVYYCQQRSNWPPGITFGHGTRLEIK

SEQ ID NO: 7399 - protein, 96 aa, Homo sapiens
EIVLTQSPVTLSLSPGERATLSCRASQSVNSYLAWYQQKPGQAPRLLIYDASNRAAGIPARFSGSGSGTDFTLTISSLEPEDFAVYYCQQRSNWPP

SEQ ID NO: 7400 - protein, 107 aa, Homo sapiens
EIVLTQSPVTLSLSPGERATLSCRASQSVNSYLAWYQQKPGQAPRLLIYDASNRAAGIPARFSGSGSGTDFTLTISSLEPEDFAVYYCQQRSNWPPLTFGGGTKVEI

SEQ ID NO: 7401 - protein, 94 aa, Homo sapiens
EIVLTQSPVTLSLSPGERATLSCRASQSVSSYLAWYQQKPGQAPRLLIYDASNRATGIPARFSGSGSGTDFTLTISSLEPEDFAVYYCQQRGNW

SEQ ID NO: 7402 - protein, 107 aa, Homo sapiens
EIVLTQSPVTLSLSPGERATLSCRASQSVSSYLAWYQQKPGQAPRLLIYDASNRATGIPARFSGSGSGTDFTLTISSLEPEDFAVYYCQQRGNWLWTFGQGTKVEIK

SEQ ID NO: 7403 - protein, 95 aa, Homo sapiens
EIVLTQSPVTLSLSPGERATLSCRASQSVSYYLAWYQQKPGQAPRLLIYDASKRATDIPARFSGSGSGTDFTLTISSLEPEDFAVYYCQQRTSWP

SEQ ID NO: 7404 - protein, 109 aa, Homo sapiens
EIVLTQSPVTLSLSPGERATLSCRASQSVSYYLAWYQQKPGQAPRLLIYDASKRATDIPARFSGSGSGTDFTLTISSLEPEDFAVYYCQQRTSWPLEYSFGQGTKLEIK

SEQ ID NO: 7405 - protein, 96 aa, Homo sapiens
EIVLTQSPVTLSLSPGERATLSCRATQSVNRYLAWYQQKPGQAPRLLIYDVSHRATGIPARFSGSGSGTDFTLTISSLEPEDFAVYYCQQRSDWPP

SEQ ID NO: 7406 - protein, 109 aa, Homo sapiens
EIVLTQSPVTLSLSPGERATLSCRATQSVNRYLAWYQQKPGQAPRLLIYDVSHRATGIPARFSGSGSGTDFTLTISSLEPEDFAVYYCQQRSDWPPTWTFGQGTKVEIK

SEQ ID NO: 7407 - protein, 96 aa, Homo sapiens
EIVLTQSPVTLSLSPGERATLSCRTSQSVSSHLAWYQQKPGQAPRLLIYDASNRATGIPARFSGSGSGTDFTLTISSLEPEDFAVYYCQQRYNWPP

SEQ ID NO: 7408 - protein, 108 aa, Homo sapiens
EIVLTQSPVTLSLSPGERATLSCRTSQSVSSHLAWYQQKPGQAPRLLIYDASNRATGIPARFSGSGSGTDFTLTISSLEPEDFAVYYCQQRYNWPPITFGQGTRLQIK

SEQ ID NO: 7409 - protein, 95 aa, Homo sapiens
EIVLTQTPGTLSLSPGERATLSCRASQSVSSNSLAWYQQKPGQAPRLLIYGASTRAPGIPDRFSGSGSGTDFTLTISRLESEDFAVYSCQQYGSS

SEQ ID NO: 7410 - protein, 108 aa, Homo sapiens
EIVLTQTPGTLSLSPGERATLSCRASQSVSSNSLAWYQQKPGQAPRLLIYGASTRAPGIPDRFSGSGSGTDFTLTISRLESEDFAVYSCQQYGSSTFTFGGGTKVEIK

SEQ ID NO: 7411 - protein, 100 aa, Homo sapiens
EIVMAQTPLSLSVTLGQPASISCKSSQSLLHSDGKTYLCWYLQKPGQPPQLLIYEVSNRFSGVPDRFSGSGSGTDFTLKISRVEAEDVGTYFCMQSVQLP

SEQ ID NO: 7412 - protein, 112 aa, Homo sapiens
EIVMAQTPLSLSVTLGQPASISCKSSQSLLHSDGKTYLCWYLQKPGQPPQLLIYEVSNRFSGVPDRFSGSGSGTDFTLKISRVEAEDVGTYFCMQSVQLPLTFGQGTRLDIK

SEQ ID NO: 7413 - protein, 95 aa, Homo sapiens
EIVMSQSPVTLSVSPGERATLSCRASQSVSSNLAWYQQQPGQAPRLLIYAASTRATGIPARFSGGGSGTEFTLTISSLQSEDFALYFCQQYNSWP

SEQ ID NO: 7414 - protein, 106 aa, Homo sapiens
EIVMSQSPVTLSVSPGERATLSCRASQSVSSNLAWYQQQPGQAPRLLIYAASTRATGIPARFSGGGSGTEFTLTISSLQSEDFALYFCQQYNSWPRTFGQGTKVEI

SEQ ID NO: 7415 - protein, 96 aa, Homo sapiens
EIVMTQFPATLSVSPGARATLSCRASQSVSSNLAWYQQKPGQAPRLLIYGASTRATGIPARFSGSGSGTDFTLTISSLEPEDFAVYYCQQRSNWPP

SEQ ID NO: 7416 - protein, 108 aa, Homo sapiens
EIVMTQFPATLSVSPGARATLSCRASQSVSSNLAWYQQKPGQAPRLLIYGASTRATGIPARFSGSGSGTDFTLTISSLEPEDFAVYYCQQRSNWPPITFGQGTRLEIK

SEQ ID NO: 7417 - protein, 96 aa, Homo sapiens
EIVMTQFPATLSVSPGERATLSCRASQSVTSDLAWYQQKPGQAPRLLIYGASTRATGIPARFSGSGSGTEFTLTISSLQSEDFAVYYCQQYNNWPP

SEQ ID NO: 7418 - protein, 108 aa, Homo sapiens
EIVMTQFPATLSVSPGERATLSCRASQSVTSDLAWYQQKPGQAPRLLIYGASTRATGIPARFSGSGSGTEFTLTISSLQSEDFAVYYCQQYNNWPPLTFGGGTKVEIK

SEQ ID NO: 7419 - protein, 95 aa, Homo sapiens
EIVMTQFPGTLSVSPGERATLSCRASESISNNLAWYQQKPGQAPRLLIYGTSTRATGIPARFSGSGSGTQFTLTISSMQSEDFAVYYCQQYNNWP

SEQ ID NO: 7420 - protein, 106 aa, Homo sapiens
EIVMTQFPGTLSVSPGERATLSCRASESISNNLAWYQQKPGQAPRLLIYGTSTRATGIPARFSGSGSGTQFTLTISSMQSEDFAVYYCQQYNNWPTFGLGTKVESK

SEQ ID NO: 7421 - protein, 96 aa, Homo sapiens
EIVMTQSPAALSVSPGERVTLSCRASQSVNTKLAWYQHKPGQAPRLLIYGTSTRATGVPGRFSGSGSGTEFTLTISTIQSEDFAIYYCQQYNNWPP

SEQ ID NO: 7422 - protein, 108 aa, Homo sapiens
EIVMTQSPAALSVSPGERVTLSCRASQSVNTKLAWYQHKPGQAPRLLIYGTSTRATGVPGRFSGSGSGTEFTLTISTIQSEDFAIYYCQQYNNWPPITFGQGTRLEIK

SEQ ID NO: 7423 - protein, 96 aa, Homo sapiens
EIVMTQSPAILSVSPGERATLSCRASQSVTSNLAWYQQKPGQAPRLLIHSASTRATGIPARFSGSGSGTEFTLTISSLQSEDFAVYYCQQYHNWPP

SEQ ID NO: 7424 - protein, 107 aa, Homo sapiens
EIVMTQSPAILSVSPGERATLSCRASQSVTSNLAWYQQKPGQAPRLLIHSASTRATGIPARFSGSGSGTEFTLTISSLQSEDFAVYYCQQYHNWPPLTFGGGTKVEI

SEQ ID NO: 7425 - protein, 96 aa, Homo sapiens
EIVMTQSPASLSVSPGERATLSCRASQSVVSNLAWYQQRPGQAPRLLIHGASTRATGIPARFSGSGSGTEFTLTISSLQSEDFAVYYCQQYYNWPP

SEQ ID NO: 7426 - protein, 108 aa, Homo sapiens
EIVMTQSPASLSVSPGERATLSCRASQSVVSNLAWYQQRPGQAPRLLIHGASTRATGIPARFSGSGSGTEFTLTISSLQSEDFAVYYCQQYYNWPPLTFGGGTKVEIK

SEQ ID NO: 7427 - protein, 96 aa, Homo sapiens
EIVMTQSPATLAVSPGERATLSCRASQSVSSNLAWYQHRPGQAPRLLISGASTRAAGIPARFSGSGSGTEFTLTITSMQSEDFAVYYCQQYYNWPP

SEQ ID NO: 7428 - protein, 108 aa, Homo sapiens
EIVMTQSPATLAVSPGERATLSCRASQSVSSNLAWYQHRPGQAPRLLISGASTRAAGIPARFSGSGSGTEFTLTITSMQSEDFAVYYCQQYYNWPPITFGQGTRLEMK

SEQ ID NO: 7429 - protein, 96 aa, Homo sapiens
EIVMTQSPATLAVSPGERATLSCRASQSVSTNLAWYQHKPGQAPRLLISGASTRAAGIPARFSGSGSGIEFTLTITSMQSEDFAVYYCQQYYNWPP

SEQ ID NO: 7430 - protein, 108 aa, Homo sapiens
EIVMTQSPATLAVSPGERATLSCRASQSVSTNLAWYQHKPGQAPRLLISGASTRAAGIPARFSGSGSGIEFTLTITSMQSEDFAVYYCQQYYNWPPITFGQGTRLEVK

SEQ ID NO: 7431 - protein, 96 aa, Homo sapiens
EIVMTQSPATLPVAPGERATLSCRSSQSVYSNLAWYQQKPGQAPRLLIYDASTRATGIPARFSGSGSGTEFTLTIINLQSEDFAVYYCQQYNNWPP

SEQ ID NO: 7432 - protein, 110 aa, Homo sapiens
EIVMTQSPATLPVAPGERATLSCRSSQSVYSNLAWYQQKPGQAPRLLIYDASTRATGIPARFSGSGSGTEFTLTIINLQSEDFAVYYCQQYNNWPPGEDTFGQGTKLEIK

SEQ ID NO: 7433 - protein, 96 aa, Homo sapiens
EIVMTQSPATLSISPGERATLSCRASQSVSISLAWYQQKPGQAPRLLIYAASTRATGVPARFSGSGSGTEFTLTISSMQSEDFAVYYCQQYNDWPP

SEQ ID NO: 7434 - protein, 108 aa, Homo sapiens
EIVMTQSPATLSISPGERATLSCRASQSVSISLAWYQQKPGQAPRLLIYAASTRATGVPARFSGSGSGTEFTLTISSMQSEDFAVYYCQQYNDWPPLTFGGGTKVEIK

SEQ ID NO: 7435 - protein, 96 aa, Homo sapiens
EIVMTQSPATLSLSPGERATFSCRASQSVSSDLAWYQQKPGQVPRLLIYGASTRATGIPARFSGSGSGTEFTLTITSLQSEDFAVYYCQQYHNWPP

SEQ ID NO: 7436 - protein, 108 aa, Homo sapiens
EIVMTQSPATLSLSPGERATFSCRASQSVSSDLAWYQQKPGQVPRLLIYGASTRATGIPARFSGSGSGTEFTLTITSLQSEDFAVYYCQQYHNWPPLTFGGGTKVEIK

SEQ ID NO: 7437 - protein, 94 aa, Homo sapiens
EIVMTQSPATLSLSPGERATLSCRASQSVSSNLAWYQQKPGQAPRLLIYGASTRATGIPDRFSGSGSGTEFTLTISSLQSEDFAVYYCKQYNNW

SEQ ID NO: 7438 - protein, 106 aa, Homo sapiens
EIVMTQSPATLSLSPGERATLSCRASQSVSSNLAWYQQKPGQAPRLLIYGASTRATGIPDRFSGSGSGTEFTLTISSLQSEDFAVYYCKQYNNWRTFGPGTKVDIK

SEQ ID NO: 7439 - protein, 96 aa, Homo sapiens
EIVMTQSPATLSLSPGERATLSCRASQSVTTFLAWYQQKPGQPPRLLIYGASTRATGVPARFSGSGSGTEFTLTISSLQSEDFAVYYCQQYNSWPP

SEQ ID NO: 7440 - protein, 109 aa, Homo sapiens
EIVMTQSPATLSLSPGERATLSCRASQSVTTFLAWYQQKPGQPPRLLIYGASTRATGVPARFSGSGSGTEFTLTISSLQSEDFAVYYCQQYNSWPPMYTFGQGTKLEIK

SEQ ID NO: 7441 - protein, 96 aa, Homo sapiens
EIVMTQSPATLSMSPGERATLSCRASQSVSSSLAWYQQKPGQAPRLLIYGASTRATGIPARFSGSGSGTEFTLTISSLQSEDFAVYYCQQYNNWPP

SEQ ID NO: 7442 - protein, 108 aa, Homo sapiens
EIVMTQSPATLSMSPGERATLSCRASQSVSSSLAWYQQKPGQAPRLLIYGASTRATGIPARFSGSGSGTEFTLTISSLQSEDFAVYYCQQYNNWPPLTFGGGTKVEIK

SEQ ID NO: 7443 - protein, 96 aa, Homo sapiens
EIVMTQSPATLSMSPGQRVTLSCRASQSVNNNLAWYQKKPGQAPRLLIYAASTRATGIPARFSGSGSGTEFTLTIGSLQSDDFAVYYCQQYSNWPP

SEQ ID NO: 7444 - protein, 108 aa, Homo sapiens
EIVMTQSPATLSMSPGQRVTLSCRASQSVNNNLAWYQKKPGQAPRLLIYAASTRATGIPARFSGSGSGTEFTLTIGSLQSDDFAVYYCQQYSNWPPLTFGGGTKVEIK

SEQ ID NO: 7445 - protein, 96 aa, Homo sapiens
EIVMTQSPATLSVSAGERATLSCRASQSVSSDLAWYQQKPGQAPRLLIYGASTRATGIPARFSGSGSGTEFTLTISSMQSEDFALYYCQQYHNWPP

SEQ ID NO: 7446 - protein, 108 aa, Homo sapiens
EIVMTQSPATLSVSAGERATLSCRASQSVSSDLAWYQQKPGQAPRLLIYGASTRATGIPARFSGSGSGTEFTLTISSMQSEDFALYYCQQYHNWPPITFGQGTRLEIK

SEQ ID NO: 7447 - protein, 96 aa, Homo sapiens
EIVMTQSPATLSVSLGDRATLSCRASQSVGSNLAWYQQKPGQAPRLLIYGVSTRATGFPARFSGSGSGTEFTLTITSLQPEDFAVYYCQQYNNWPP

SEQ ID NO: 7448 - protein, 108 aa, Homo sapiens
EIVMTQSPATLSVSLGDRATLSCRASQSVGSNLAWYQQKPGQAPRLLIYGVSTRATGFPARFSGSGSGTEFTLTITSLQPEDFAVYYCQQYNNWPPITFGQGTRLEIK

SEQ ID NO: 7449 - protein, 96 aa, Homo sapiens
EIVMTQSPATLSVSLGEGATLSCRASQTVNTKLAWYQHKPGQAPRLLIYGASTRATGVPARFSGGGSGTEFTLTISSMESEDFAVYYCQQYNNWPP

SEQ ID NO: 7450 - protein, 108 aa, Homo sapiens
EIVMTQSPATLSVSLGEGATLSCRASQTVNTKLAWYQHKPGQAPRLLIYGASTRATGVPARFSGGGSGTEFTLTISSMESEDFAVYYCQQYNNWPPITFGQGTRLEIK

SEQ ID NO: 7451 - protein, 96 aa, Homo sapiens
EIVMTQSPATLSVSLGEGATLSCRASQTVSTNLAWYQQKPGQAPRLLIYGASTRATGIPARFSGSGSGTEFTLTISGLQSEDFAVYYCQQYNNWPP

SEQ ID NO: 7452 - protein, 108 aa, Homo sapiens
EIVMTQSPATLSVSLGEGATLSCRASQTVSTNLAWYQQKPGQAPRLLIYGASTRATGIPARFSGSGSGTEFTLTISGLQSEDFAVYYCQQYNNWPPITFGQGTRLEIK

SEQ ID NO: 7453 - protein, 96 aa, Homo sapiens
EIVMTQSPATLSVSPGDRATLSCRASQSISSNLAWYQQKPGQAPRLLIHAASTRATGVPARFSGSGSGTEFTLAISNVQSEDFAVYYCQQYYNWPP

SEQ ID NO: 7454 - protein, 108 aa, Homo sapiens
EIVMTQSPATLSVSPGDRATLSCRASQSISSNLAWYQQKPGQAPRLLIHAASTRATGVPARFSGSGSGTEFTLAISNVQSEDFAVYYCQQYYNWPPLTFGGGTKVEIK

SEQ ID NO: 7455 - protein, 96 aa, Homo sapiens
EIVMTQSPATLSVSPGEGATLSCRASQSVNSDLAWYQQKPGQAPRLLIYGASTGATDIPARFSGSGSGTEFTLTISSLQSEDFAVYYCQQYYNWPP

SEQ ID NO: 7456 - protein, 107 aa, Homo sapiens
EIVMTQSPATLSVSPGEGATLSCRASQSVNSDLAWYQQKPGQAPRLLIYGASTGATDIPARFSGSGSGTEFTLTISSLQSEDFAVYYCQQYYNWPPTFGHGTKVEIK

SEQ ID NO: 7457 - protein, 95 aa, Homo sapiens
EIVMTQSPATLSVSPGEGATLSCRASQSVNSYLAWYQQKPGQAPRLLIYGASTRATGIPARFSGSGSGTEFSLTISSMQPADFAVYYCQQYNNWP

SEQ ID NO: 7458 - protein, 107 aa, Homo sapiens
EIVMTQSPATLSVSPGEGATLSCRASQSVNSYLAWYQQKPGQAPRLLIYGASTRATGIPARFSGSGSGTEFSLTISSMQPADFAVYYCQQYNNWPRTFGQGTKVEIK

SEQ ID NO: 7459 - protein, 96 aa, Homo sapiens
EIVMTQSPATLSVSPGEGVTLSCRASQSVSSNLAWYQQKPGQAPRLLIYGASTRATGIPARFSGSGSGTEFTLTISSLQSEDFAVYYCQQYYNWPP

SEQ ID NO: 7460 - protein, 108 aa, Homo sapiens
EIVMTQSPATLSVSPGEGVTLSCRASQSVSSNLAWYQQKPGQAPRLLIYGASTRATGIPARFSGSGSGTEFTLTISSLQSEDFAVYYCQQYYNWPPLTFGGGTKVEIK

SEQ ID NO: 7461 - protein, 95 aa, Homo sapiens
EIVMTQSPATLSVSPGERAALSCRASQSVSSDLAWYQQKPGQAPRLLIYGASTRATGIPARFSGSGSGTEFTLTISSLQSEDFAVYYCQQYNNWP

SEQ ID NO: 7462 - protein, 107 aa, Homo sapiens
EIVMTQSPATLSVSPGERAALSCRASQSVSSDLAWYQQKPGQAPRLLIYGASTRATGIPARFSGSGSGTEFTLTISSLQSEDFAVYYCQQYNNWPGDFGPGTKVDIK

SEQ ID NO: 7463 - protein, 96 aa, Homo sapiens
EIVMTQSPATLSVSPGERAILSCRASQSVSSDLAWYQQKPGQAPRLLIYGASTRATGIPARFSGGGSGTEFTLTINSLQSEDFAVYYCQQYNNWPP

SEQ ID NO: 7464 - protein, 108 aa, Homo sapiens
EIVMTQSPATLSVSPGERAILSCRASQSVSSDLAWYQQKPGQAPRLLIYGASTRATGIPARFSGGGSGTEFTLTINSLQSEDFAVYYCQQYNNWPPLTFGGGTKVEIK

SEQ ID NO: 7465 - protein, 96 aa, Homo sapiens
EIVMTQSPATLSVSPGERAILSCRASQSVSSNLAWYQQKPGQAPRLLISGASTRATGIPARFSGSGSGTEFTLTISSMQSEDFAVYYCQQYSNWPP

SEQ ID NO: 7466 - protein, 108 aa, Homo sapiens
EIVMTQSPATLSVSPGERAILSCRASQSVSSNLAWYQQKPGQAPRLLISGASTRATGIPARFSGSGSGTEFTLTISSMQSEDFAVYYCQQYSNWPPLTFGGGTKVEMK

SEQ ID NO: 7467 - protein, 95 aa, Homo sapiens
EIVMTQSPATLSVSPGERATLSCKASKNISKNLAWYQQKPGQAPRLVIYGASTRATGIPARFSGSGSGTEFTLTISSMESEDSALYYCQQFNNWP

SEQ ID NO: 7468 - protein, 106 aa, Homo sapiens
EIVMTQSPATLSVSPGERATLSCKASKNISKNLAWYQQKPGQAPRLVIYGASTRATGIPARFSGSGSGTEFTLTISSMESEDSALYYCQQFNNWPTFGQGTKVEIK

SEQ ID NO: 7469 - protein, 95 aa, Homo sapiens
EIVMTQSPATLSVSPGERATLSCRASESISSNLAWYQQKPGQAPRLLIYGASTRAPGIPTRFSGSGSGTEFTLTISSLQSEDFAVYYCQQYNNWP

SEQ ID NO: 7470 - protein, 106 aa, Homo sapiens
EIVMTQSPATLSVSPGERATLSCRASESISSNLAWYQQKPGQAPRLLIYGASTRAPGIPTRFSGSGSGTEFTLTISSLQSEDFAVYYCQQYNNWPFFGPGTKVHIK

SEQ ID NO: 7471 - protein, 95 aa, Homo sapiens
EIVMTQSPATLSVSPGERATLSCRASESISTHLAWYQQKPGQAPRLLIYGSSTRAAGIPARFSGSGSGTEFTLTISSLQSEDSAVYYCQQYNNWP

SEQ ID NO: 7472 - protein, 106 aa, Homo sapiens
EIVMTQSPATLSVSPGERATLSCRASESISTHLAWYQQKPGQAPRLLIYGSSTRAAGIPARFSGSGSGTEFTLTISSLQSEDSAVYYCQQYNNWPLFGPGTKVHIK

SEQ ID NO: 7473 - protein, 95 aa, Homo sapiens
EIVMTQSPATLSVSPGERATLSCRASESVGTYLAWYQQRPGQVPRLLIYGASTRATGTPARFSGSGSGTEFTLTISSMQSEDFAVYYCQQYNIWP

SEQ ID NO: 7474 - protein, 107 aa, Homo sapiens
EIVMTQSPATLSVSPGERATLSCRASESVGTYLAWYQQRPGQVPRLLIYGASTRATGTPARFSGSGSGTEFTLTISSMQSEDFAVYYCQQYNIWPRMFGQGTKVEVK

SEQ ID NO: 7475 - protein, 95 aa, Homo sapiens
EIVMTQSPATLSVSPGERATLSCRASESVSSHLAWYQHKPGQSPRLLIYGASTRATGVPARFSGSGSGTEFTLTISSLQSEDFAVYYCQQYNNWP

SEQ ID NO: 7476 - protein, 106 aa, Homo sapiens
EIVMTQSPATLSVSPGERATLSCRASESVSSHLAWYQHKPGQSPRLLIYGASTRATGVPARFSGSGSGTEFTLTISSLQSEDFAVYYCQQYNNWPGFGQGTKLEIK

SEQ ID NO: 7477 - protein, 96 aa, Homo sapiens
EIVMTQSPATLSVSPGERATLSCRASLSVGTNLAWYQQKPGQAPRLLIYGASTRATGIPARFGGSGSGTDFTLTINSLQSEDFAVYYCQQYNNWPP

SEQ ID NO: 7478 - protein, 108 aa, Homo sapiens
EIVMTQSPATLSVSPGERATLSCRASLSVGTNLAWYQQKPGQAPRLLIYGASTRATGIPARFGGSGSGTDFTLTINSLQSEDFAVYYCQQYNNWPPLTFGGGTQVEIK

SEQ ID NO: 7479 - protein, 95 aa, Homo sapiens
EIVMTQSPATLSVSPGERATLSCRASQILSTNLAWYQQKPGQSPRLVIYGASTRATGIPARFSGTGSGTEFTFTISSMQSEDFAVYYCQQYNDWP

SEQ ID NO: 7480 - protein, 107 aa, Homo sapiens
EIVMTQSPATLSVSPGERATLSCRASQILSTNLAWYQQKPGQSPRLVIYGASTRATGIPARFSGTGSGTEFTFTISSMQSEDFAVYYCQQYNDWPYTFGQGTKLEIK

SEQ ID NO: 7481 - protein, 96 aa, Homo sapiens
EIVMTQSPATLSVSPGERATLSCRASQNIRSNLAWYQQQPGQAPRLLIYGASTRATDIPARFSGSGSGTEFTLTISSLQSEDFAVYYCQQYDNWPP

SEQ ID NO: 7482 - protein, 108 aa, Homo sapiens
EIVMTQSPATLSVSPGERATLSCRASQNIRSNLAWYQQQPGQAPRLLIYGASTRATDIPARFSGSGSGTEFTLTISSLQSEDFAVYYCQQYDNWPPITFGQGTKVEIK

SEQ ID NO: 7483 - protein, 96 aa, Homo sapiens
EIVMTQSPATLSVSPGERATLSCRASQNVNNNLAWYQQKPGQAPRLVIYDASTRATGIPARFSGSGSGTEFSLTITSLQSEDFAVYYCQQYNEWTP

SEQ ID NO: 7484 - protein, 108 aa, Homo sapiens
EIVMTQSPATLSVSPGERATLSCRASQNVNNNLAWYQQKPGQAPRLVIYDASTRATGIPARFSGSGSGTEFSLTITSLQSEDFAVYYCQQYNEWTPLTFGGGTKVDIK

SEQ ID NO: 7485 - protein, 96 aa, Homo sapiens
EIVMTQSPATLSVSPGERATLSCRASQSIRSSLAWYQQKPGQAPRLLISGASTRATGIPDRFSGSGSGTEFTLTISSMQSEDFAVYYCQQYHNWPP

SEQ ID NO: 7486 - protein, 108 aa, Homo sapiens
EIVMTQSPATLSVSPGERATLSCRASQSIRSSLAWYQQKPGQAPRLLISGASTRATGIPDRFSGSGSGTEFTLTISSMQSEDFAVYYCQQYHNWPPLTFGGGTKVEMK

SEQ ID NO: 7487 - protein, 96 aa, Homo sapiens
EIVMTQSPATLSVSPGERATLSCRASQSISNNLAWYQQKPGQAPRLLIYGASTRATGIPARFSGSGSGTEFTLTISSLQSEDFAVYYCQQHNNWPP

SEQ ID NO: 7488 - protein, 108 aa, Homo sapiens
EIVMTQSPATLSVSPGERATLSCRASQSISNNLAWYQQKPGQAPRLLIYGASTRATGIPARFSGSGSGTEFTLTISSLQSEDFAVYYCQQHNNWPPWTFGQGTKVEIK

SEQ ID NO: 7489 - protein, 96 aa, Homo sapiens
EIVMTQSPATLSVSPGERATLSCRASQSISRDLAWYQQKPGQAPRLIIYGASTRASGFPPRFSGSGSGTEFTLTISSLQSEDFAIYYCQQYNNWPP

SEQ ID NO: 7490 - protein, 108 aa, Homo sapiens
EIVMTQSPATLSVSPGERATLSCRASQSISRDLAWYQQKPGQAPRLIIYGASTRASGFPPRFSGSGSGTEFTLTISSLQSEDFAIYYCQQYNNWPPITFGQGTRLEIK

SEQ ID NO: 7491 - protein, 96 aa, Homo sapiens
EIVMTQSPATLSVSPGERATLSCRASQSISSDLAWYQQKPGQAPRLLIYAASTRATGIPARFSGSGSGTEFALTITSMQSEDFAVYYCQQYNIWPP

SEQ ID NO: 7492 - protein, 108 aa, Homo sapiens
EIVMTQSPATLSVSPGERATLSCRASQSISSDLAWYQQKPGQAPRLLIYAASTRATGIPARFSGSGSGTEFALTITSMQSEDFAVYYCQQYNIWPPLTFGGGTKVEIK

SEQ ID NO: 7493 - protein, 96 aa, Homo sapiens
EIVMTQSPATLSVSPGERATLSCRASQSISSDLAWYQQRPGQAPRLLIYGASTRATGIPARFSGSGSGTEFTLTINSLQSEDFAVYYCQQYNNWPP

SEQ ID NO: 7494 - protein, 108 aa, Homo sapiens
EIVMTQSPATLSVSPGERATLSCRASQSISSDLAWYQQRPGQAPRLLIYGASTRATGIPARFSGSGSGTEFTLTINSLQSEDFAVYYCQQYNNWPPWTFGQGTKVEIK

SEQ ID NO: 7495 - protein, 95 aa, Homo sapiens
EIVMTQSPATLSVSPGERATLSCRASQSISSNLAWYQQKPGQAPRFLIYGASTRATGIPARFSGSGSGTEFTLTISSMQSEDFAVYYCQQYNNWP

SEQ ID NO: 7496 - protein, 108 aa, Homo sapiens
EIVMTQSPATLSVSPGERATLSCRASQSISSNLAWYQQKPGQAPRFLIYGASTRATGIPARFSGSGSGTEFTLTISSMQSEDFAVYYCQQYNNWPSATFGQGTKVEIK

SEQ ID NO: 7497 - protein, 96 aa, Homo sapiens
EIVMTQSPATLSVSPGERATLSCRASQSISSNLAWYQQKPGQAPRLLIYGASTRATGIPARFSGSGSGTEFTLTISSLQSEDFAVYYCQQYNNWPP

SEQ ID NO: 7498 - protein, 107 aa, Homo sapiens
EIVMTQSPATLSVSPGERATLSCRASQSISSNLAWYQQKPGQAPRLLIYGASTRATGIPARFSGSGSGTEFTLTISSLQSEDFAVYYCQQYNNWPPLTFGGGTKVEI

SEQ ID NO: 7499 - protein, 96 aa, Homo sapiens
EIVMTQSPATLSVSPGERATLSCRASQSISSNLAWYQQKPGQAPRLLIYGASTRATGIPARFSGSGSGTEFTLTISSMQSEDFAVYYCQQYHNWPP

SEQ ID NO: 7500 - protein, 108 aa, Homo sapiens
EIVMTQSPATLSVSPGERATLSCRASQSISSNLAWYQQKPGQAPRLLIYGASTRATGIPARFSGSGSGTEFTLTISSMQSEDFAVYYCQQYHNWPPLTFGGGTKVEIK

SEQ ID NO: 7501 - protein, 96 aa, Homo sapiens
EIVMTQSPATLSVSPGERATLSCRASQSISSNLAWYQQKPGQTPRLLIYGASTRATGIPAKFSGSGSGTDFTLTISSMQSEDFAVYYCQQYNNWPP

SEQ ID NO: 7502 - protein, 107 aa, Homo sapiens
EIVMTQSPATLSVSPGERATLSCRASQSISSNLAWYQQKPGQTPRLLIYGASTRATGIPAKFSGSGSGTDFTLTISSMQSEDFAVYYCQQYNNWPPLTFGPGTKVDF

SEQ ID NO: 7503 - protein, 96 aa, Homo sapiens
EIVMTQSPATLSVSPGERATLSCRASQSISSSLAWYQQKPGQAPRLLIYGSSTRATGIPARFSGSGSGTEFTLTISSLQSEDFAVYYCQQYNNWPP

SEQ ID NO: 7504 - protein, 108 aa, Homo sapiens
EIVMTQSPATLSVSPGERATLSCRASQSISSSLAWYQQKPGQAPRLLIYGSSTRATGIPARFSGSGSGTEFTLTISSLQSEDFAVYYCQQYNNWPPLTFGGGTKVEIK

SEQ ID NO: 7505 - protein, 95 aa, Homo sapiens
EIVMTQSPATLSVSPGERATLSCRASQSISSSLAWYQQKPGQAPSLLIYGASTRATGIPARFSGSGSGTEFTLTISSLQSEDFAVYYCQQYKNWP

SEQ ID NO: 7506 - protein, 108 aa, Homo sapiens
EIVMTQSPATLSVSPGERATLSCRASQSISSSLAWYQQKPGQAPSLLIYGASTRATGIPARFSGSGSGTEFTLTISSLQSEDFAVYYCQQYKNWPSYSFGQGTKLDIK

SEQ ID NO: 7507 - protein, 95 aa, Homo sapiens
EIVMTQSPATLSVSPGERATLSCRASQSISSSLAWYQQKPGQAPSLLIYGASTRATGIPARFSGSGSGTEFTLTISSLQSEDFAVYYCQQYNNWP

SEQ ID NO: 7508 - protein, 108 aa, Homo sapiens
EIVMTQSPATLSVSPGERATLSCRASQSISSSLAWYQQKPGQAPSLLIYGASTRATGIPARFSGSGSGTEFTLTISSLQSEDFAVYYCQQYNNWPSYSFGQGTKLDIK

SEQ ID NO: 7509 - protein, 96 aa, Homo sapiens
EIVMTQSPATLSVSPGERATLSCRASQSITSNLAWYQRKPGQAPRLLIYGASTRATGIPARFSGSGSGTEFSLTINSLQSEDFAVYYCQQYHNWPP

SEQ ID NO: 7510 - protein, 108 aa, Homo sapiens
EIVMTQSPATLSVSPGERATLSCRASQSITSNLAWYQRKPGQAPRLLIYGASTRATGIPARFSGSGSGTEFSLTINSLQSEDFAVYYCQQYHNWPPITFGPGTKVDIK

SEQ ID NO: 7511 - protein, 96 aa, Homo sapiens
EIVMTQSPATLSVSPGERATLSCRASQSLSSDLAWYQQKPGQAPRLLIYGASTRATGVPPRFSGSGSGTEFTLTISSLQSEDFALYYCQQYNNWPP

SEQ ID NO: 7512 - protein, 108 aa, Homo sapiens
EIVMTQSPATLSVSPGERATLSCRASQSLSSDLAWYQQKPGQAPRLLIYGASTRATGVPPRFSGSGSGTEFTLTISSLQSEDFALYYCQQYNNWPPITFGQGTRLEIK

SEQ ID NO: 7513 - protein, 96 aa, Homo sapiens
EIVMTQSPATLSVSPGERATLSCRASQSVASDLAWYQQKPGQAPRLLIYGASTRATGIPARFSGSGSGTDFTLTISSLQSEDFAVYYCQQYNNWPP

SEQ ID NO: 7514 - protein, 108 aa, Homo sapiens
EIVMTQSPATLSVSPGERATLSCRASQSVASDLAWYQQKPGQAPRLLIYGASTRATGIPARFSGSGSGTDFTLTISSLQSEDFAVYYCQQYNNWPPLTFGGGTKVEIK

SEQ ID NO: 7515 - protein, 95 aa, Homo sapiens
EIVMTQSPATLSVSPGERATLSCRASQSVDGNLAWYQQNPGQAPRLLIYGASIRATGIPARFSGSGSRTEFTLTISSLQSEDFALYYCQQYNDWP

SEQ ID NO: 7516 - protein, 106 aa, Homo sapiens
EIVMTQSPATLSVSPGERATLSCRASQSVDGNLAWYQQNPGQAPRLLIYGASIRATGIPARFSGSGSRTEFTLTISSLQSEDFALYYCQQYNDWPRTFGQGTKLEI

SEQ ID NO: 7517 - protein, 96 aa, Homo sapiens
EIVMTQSPATLSVSPGERATLSCRASQSVDTSLAWYQQKPGQAPRLLIYGASTRATGVPARFSGSGSGTEFTLTISSLQSEDFAVYYCQQYHNWPP

SEQ ID NO: 7518 - protein, 108 aa, Homo sapiens
EIVMTQSPATLSVSPGERATLSCRASQSVDTSLAWYQQKPGQAPRLLIYGASTRATGVPARFSGSGSGTEFTLTISSLQSEDFAVYYCQQYHNWPPLTFGGGTKVEIK

SEQ ID NO: 7519 - protein, 96 aa, Homo sapiens
EIVMTQSPATLSVSPGERATLSCRASQSVGGNLAWYQQKPGQAPRLLIYGASTRATGIPARFSGSGSGTEFTLTISSLQSEDVAVYYCQQYNNWPP

SEQ ID NO: 7520 - protein, 108 aa, Homo sapiens
EIVMTQSPATLSVSPGERATLSCRASQSVGGNLAWYQQKPGQAPRLLIYGASTRATGIPARFSGSGSGTEFTLTISSLQSEDVAVYYCQQYNNWPPWTFGQGTKVEIK

SEQ ID NO: 7521 - protein, 96 aa, Homo sapiens
EIVMTQSPATLSVSPGERATLSCRASQSVGRDLAWYQHKPGQAPRLLVYGASTRATGIPARFSGSGSGTEFTLTISSLQSEDFALYYCQQYNNWPP

SEQ ID NO: 7522 - protein, 108 aa, Homo sapiens
EIVMTQSPATLSVSPGERATLSCRASQSVGRDLAWYQHKPGQAPRLLVYGASTRATGIPARFSGSGSGTEFTLTISSLQSEDFALYYCQQYNNWPPATFGQGTRLDIK

SEQ ID NO: 7523 - protein, 96 aa, Homo sapiens
EIVMTQSPATLSVSPGERATLSCRASQSVGSKLAWYQQKPGQAPRLLISGASTRATGIPARFSGSGSGTEFTLTISSVQPEDFAVYYCQQYNNWPP

SEQ ID NO: 7524 - protein, 108 aa, Homo sapiens
EIVMTQSPATLSVSPGERATLSCRASQSVGSKLAWYQQKPGQAPRLLISGASTRATGIPARFSGSGSGTEFTLTISSVQPEDFAVYYCQQYNNWPPLTFGGGTKVEIK

SEQ ID NO: 7525 - protein, 96 aa, Homo sapiens
EIVMTQSPATLSVSPGERATLSCRASQSVGSNLAWYQQKPGQAPRLLIYGASTRATGIPARFSGSGSGTEFTLTIASLQSEDFALYYCQQFNSWPP

SEQ ID NO: 7526 - protein, 109 aa, Homo sapiens
EIVMTQSPATLSVSPGERATLSCRASQSVGSNLAWYQQKPGQAPRLLIYGASTRATGIPARFSGSGSGTEFTLTIASLQSEDFALYYCQQFNSWPPRLTFGGGTKVEIK

SEQ ID NO: 7527 - protein, 96 aa, Homo sapiens
EIVMTQSPATLSVSPGERATLSCRASQSVGSSLAWYQQKPGQAPRLLIYGASTRATGIPARFSGSGSGTDFTLTISSLQSEDFAVYSCQQYFNWPP

SEQ ID NO: 7528 - protein, 108 aa, Homo sapiens
EIVMTQSPATLSVSPGERATLSCRASQSVGSSLAWYQQKPGQAPRLLIYGASTRATGIPARFSGSGSGTDFTLTISSLQSEDFAVYSCQQYFNWPPLTFGGGTKVEIK

SEQ ID NO: 7529 - protein, 96 aa, Homo sapiens
EIVMTQSPATLSVSPGERATLSCRASQSVLSNLAWYQQKPGQAPRLLIYGASTRATGIPARFSGSGSGTQFTLTINSLQSEDFAVYYCQQYNNWPP

SEQ ID NO: 7530 - protein, 108 aa, Homo sapiens
EIVMTQSPATLSVSPGERATLSCRASQSVLSNLAWYQQKPGQAPRLLIYGASTRATGIPARFSGSGSGTQFTLTINSLQSEDFAVYYCQQYNNWPPLTFGGGTKVEIK

SEQ ID NO: 7531 - protein, 95 aa, Homo sapiens
EIVMTQSPATLSVSPGERATLSCRASQSVNNYLAWYQQKPGQVPRLLIYGVSTRATGIPARFSGSGSGTEFTLTISSMQSEDFAVYYCQQYNNWP

SEQ ID NO: 7532 - protein, 107 aa, Homo sapiens
EIVMTQSPATLSVSPGERATLSCRASQSVNNYLAWYQQKPGQVPRLLIYGVSTRATGIPARFSGSGSGTEFTLTISSMQSEDFAVYYCQQYNNWPRMFGQGTKVEIK

SEQ ID NO: 7533 - protein, 96 aa, Homo sapiens
EIVMTQSPATLSVSPGERATLSCRASQSVNSNLAWYQQKPGQAPRLLIYAASTRATGIPARFTGSGSGTEFTLTINSMQSEDFAVYYCQQYNYWPP

SEQ ID NO: 7534 - protein, 108 aa, Homo sapiens
EIVMTQSPATLSVSPGERATLSCRASQSVNSNLAWYQQKPGQAPRLLIYAASTRATGIPARFTGSGSGTEFTLTINSMQSEDFAVYYCQQYNYWPPYTFGQGTKLEIK

SEQ ID NO: 7535 - protein, 96 aa, Homo sapiens
EIVMTQSPATLSVSPGERATLSCRASQSVNSNLAWYQQRPGQAPRLLIYTASTRATGIPARFSGSGSGTEFTLTISSIQPEDFAVYYCQQYSNWPP

SEQ ID NO: 7536 - protein, 108 aa, Homo sapiens
EIVMTQSPATLSVSPGERATLSCRASQSVNSNLAWYQQRPGQAPRLLIYTASTRATGIPARFSGSGSGTEFTLTISSIQPEDFAVYYCQQYSNWPPLTFGGGTKVEIK

SEQ ID NO: 7537 - protein, 96 aa, Homo sapiens
EIVMTQSPATLSVSPGERATLSCRASQSVNSNVAWYQKKPGQPPRLLIYGASTRATGIPARFSGSGSGAEFILTISSLQSEDLAVYYCHHYNNWLP

SEQ ID NO: 7538 - protein, 107 aa, Homo sapiens
EIVMTQSPATLSVSPGERATLSCRASQSVNSNVAWYQKKPGQPPRLLIYGASTRATGIPARFSGSGSGAEFILTISSLQSEDLAVYYCHHYNNWLPTFGQGTKVEIK

SEQ ID NO: 7539 - protein, 96 aa, Homo sapiens
EIVMTQSPATLSVSPGERATLSCRASQSVNTKLAWYQQKPGQAPRLLIYGASTRATGIPARFSGSGSGTEFTLIISSMQSEDFAVYYCQQYNNWPP

SEQ ID NO: 7540 - protein, 107 aa, Homo sapiens
EIVMTQSPATLSVSPGERATLSCRASQSVNTKLAWYQQKPGQAPRLLIYGASTRATGIPARFSGSGSGTEFTLIISSMQSEDFAVYYCQQYNNWPPITFGQGTRLEI

SEQ ID NO: 7541 - protein, 95 aa, Homo sapiens
EIVMTQSPATLSVSPGERATLSCRASQSVRRNVAWYQQKPGQAPRLLIYGASARATGIPARFSGSGSGTEFTLTISSLQSEDFAVYYCQQYNNWP

SEQ ID NO: 7542 - protein, 109 aa, Homo sapiens
EIVMTQSPATLSVSPGERATLSCRASQSVRRNVAWYQQKPGQAPRLLIYGASARATGIPARFSGSGSGTEFTLTISSLQSEDFAVYYCQQYNNWPRALTFGGGIKVEFK

SEQ ID NO: 7543 - protein, 96 aa, Homo sapiens
EIVMTQSPATLSVSPGERATLSCRASQSVRSDLAWYQQKPGQAPRLLIYGASTRATGIPARFSGSGSGTEFTLTISSLQSEDFAVYYCQQYNNWPP

SEQ ID NO: 7544 - protein, 108 aa, Homo sapiens
EIVMTQSPATLSVSPGERATLSCRASQSVRSDLAWYQQKPGQAPRLLIYGASTRATGIPARFSGSGSGTEFTLTISSLQSEDFAVYYCQQYNNWPPLTFGGGTKVEIK

SEQ ID NO: 7545 - protein, 95 aa, Homo sapiens
EIVMTQSPATLSVSPGERATLSCRASQSVRSFLAWYQHKPGQAPRLLIYGTSTRATGIPARFSGSGSGTEFTLTISIMQSEDFAVYYCQQYNNWP

SEQ ID NO: 7546 - protein, 107 aa, Homo sapiens
EIVMTQSPATLSVSPGERATLSCRASQSVRSFLAWYQHKPGQAPRLLIYGTSTRATGIPARFSGSGSGTEFTLTISIMQSEDFAVYYCQQYNNWPLTFGGGTKVEIK

SEQ ID NO: 7547 - protein, 96 aa, Homo sapiens
EIVMTQSPATLSVSPGERATLSCRASQSVRSNLAWYQQKPGQAPRLLIYGASTRATGIPARFSGSGSGTDFTLTISSLQSEDFAVYYCQQYDNWPP

SEQ ID NO: 7548 - protein, 108 aa, Homo sapiens
EIVMTQSPATLSVSPGERATLSCRASQSVRSNLAWYQQKPGQAPRLLIYGASTRATGIPARFSGSGSGTDFTLTISSLQSEDFAVYYCQQYDNWPPITFGPGTTVDIQ

SEQ ID NO: 7549 - protein, 96 aa, Homo sapiens
EIVMTQSPATLSVSPGERATLSCRASQSVSDNLAWYQQKPGQAPRLLIYGAATRATGIPARFSGSGSGTEFTLTISSLQSEDFGVYYCQQYNYWPP

SEQ ID NO: 7550 - protein, 108 aa, Homo sapiens
EIVMTQSPATLSVSPGERATLSCRASQSVSDNLAWYQQKPGQAPRLLIYGAATRATGIPARFSGSGSGTEFTLTISSLQSEDFGVYYCQQYNYWPPWTFGQGTRVEIK

SEQ ID NO: 7551 - protein, 96 aa, Homo sapiens
EIVMTQSPATLSVSPGERATLSCRASQSVSDNLAWYQQKPGQAPRLLIYGASTRATGIPARFSGIGSGTEFTLTISSLQSEDFGVYYCQQYNYWPP

SEQ ID NO: 7552 - protein, 108 aa, Homo sapiens
EIVMTQSPATLSVSPGERATLSCRASQSVSDNLAWYQQKPGQAPRLLIYGASTRATGIPARFSGIGSGTEFTLTISSLQSEDFGVYYCQQYNYWPPWTFGQGTRVEIK

SEQ ID NO: 7553 - protein, 96 aa, Homo sapiens
EIVMTQSPATLSVSPGERATLSCRASQSVSGNVAWYQQKPGQAPRLLIYGASTRATGIPARFSGSGSGTEFTLTISSMQSEDFAVYYCQQYNNWPP

SEQ ID NO: 7554 - protein, 108 aa, Homo sapiens
EIVMTQSPATLSVSPGERATLSCRASQSVSGNVAWYQQKPGQAPRLLIYGASTRATGIPARFSGSGSGTEFTLTISSMQSEDFAVYYCQQYNNWPPYSFGQGTRLEIK

SEQ ID NO: 7555 - protein, 96 aa, Homo sapiens
EIVMTQSPATLSVSPGERATLSCRASQSVSNNLAWYQQKLGQAPRLLIYGASTRATGIPARFSGSGSGTEFTLTISSLQSGDFAVYYCQQYHNWPP

SEQ ID NO: 7556 - protein, 108 aa, Homo sapiens
EIVMTQSPATLSVSPGERATLSCRASQSVSNNLAWYQQKLGQAPRLLIYGASTRATGIPARFSGSGSGTEFTLTISSLQSGDFAVYYCQQYHNWPPLTFGPGTKVDIK

SEQ ID NO: 7557 - protein, 96 aa, Homo sapiens
EIVMTQSPATLSVSPGERATLSCRASQSVSSDLAWYQQKPGQAPRLLIYGASIRATAIPARFSGSGSGTEFTLTISRLQSEDFAVYYCQQYNNWPP

SEQ ID NO: 7558 - protein, 108 aa, Homo sapiens
EIVMTQSPATLSVSPGERATLSCRASQSVSSDLAWYQQKPGQAPRLLIYGASIRATAIPARFSGSGSGTEFTLTISRLQSEDFAVYYCQQYNNWPPITFGGGTTVEIK

SEQ ID NO: 7559 - protein, 96 aa, Homo sapiens
EIVMTQSPATLSVSPGERATLSCRASQSVSSDLAWYQQKPGQAPRLLIYGASSRATGIPARFSGSGSGTEFTLSISSMQSEDFAVYYCQQYNNWPP

SEQ ID NO: 7560 - protein, 108 aa, Homo sapiens
EIVMTQSPATLSVSPGERATLSCRASQSVSSDLAWYQQKPGQAPRLLIYGASSRATGIPARFSGSGSGTEFTLSISSMQSEDFAVYYCQQYNNWPPLTFGGGTKVEIK

SEQ ID NO: 7561 - protein, 96 aa, Homo sapiens
EIVMTQSPATLSVSPGERATLSCRASQSVSSDLAWYQQKPGQAPRLLIYGASTRATDIPARFSGSGSGTEFTLTISSLQSEDFAVYYCQQYNNWPP

SEQ ID NO: 7562 - protein, 108 aa, Homo sapiens
EIVMTQSPATLSVSPGERATLSCRASQSVSSDLAWYQQKPGQAPRLLIYGASTRATDIPARFSGSGSGTEFTLTISSLQSEDFAVYYCQQYNNWPPVTFGQGTRLEIK

SEQ ID NO: 7563 - protein, 96 aa, Homo sapiens
EIVMTQSPATLSVSPGERATLSCRASQSVSSDLAWYQQKPGQAPRLLIYGASTRATGIPARFSGSGSGIEFTLTISSLQSEDFAVYYCQQYNNWPP

SEQ ID NO: 7564 - protein, 108 aa, Homo sapiens
EIVMTQSPATLSVSPGERATLSCRASQSVSSDLAWYQQKPGQAPRLLIYGASTRATGIPARFSGSGSGIEFTLTISSLQSEDFAVYYCQQYNNWPPLTFGGGTKVEIK

SEQ ID NO: 7565 - protein, 96 aa, Homo sapiens
EIVMTQSPATLSVSPGERATLSCRASQSVSSDLAWYQQKPGQAPRLLIYGASTRATGIPARFSGSGSGTEFTLTISSLQSEDFAVYYCQQYNNWPP

SEQ ID NO: 7566 - protein, 108 aa, Homo sapiens
EIVMTQSPATLSVSPGERATLSCRASQSVSSDLAWYQQKPGQAPRLLIYGASTRATGIPARFSGSGSGTEFTLTISSLQSEDFAVYYCQQYNNWPPITFGLGTRLEIK

SEQ ID NO: 7567 - protein, 108 aa, Homo sapiens
EIVMTQSPATLSVSPGERATLSCRASQSVSSDLAWYQQKPGQAPRLLIYGASTRATGIPARFSGSGSGTEFTLTISSLQSEDFAVYYCQQYNNWPPITFGQGTRLEIK

SEQ ID NO: 7568 - protein, 96 aa, Homo sapiens
EIVMTQSPATLSVSPGERATLSCRASQSVSSDLAWYQQKPGQAPRLLIYGASTRATGIPARFSGSGSGTEFTLTISSMQSEDFAVYYCQQYNNWPP

SEQ ID NO: 7569 - protein, 108 aa, Homo sapiens
EIVMTQSPATLSVSPGERATLSCRASQSVSSDLAWYQQKPGQAPRLLIYGASTRATGIPARFSGSGSGTEFTLTISSMQSEDFAVYYCQQYNNWPPITFGQGTRLEIK

SEQ ID NO: 7570 - protein, 96 aa, Homo sapiens
EIVMTQSPATLSVSPGERATLSCRASQSVSSDLAWYQQKPGQAPRLVIYGASIRATAIPARFSGSGSGTEFTLTISRLQSEDFAVYYCQQYHNWPP

SEQ ID NO: 7571 - protein, 108 aa, Homo sapiens
EIVMTQSPATLSVSPGERATLSCRASQSVSSDLAWYQQKPGQAPRLVIYGASIRATAIPARFSGSGSGTEFTLTISRLQSEDFAVYYCQQYHNWPPITFGGGTTVEIK

SEQ ID NO: 7572 - protein, 96 aa, Homo sapiens
EIVMTQSPATLSVSPGERATLSCRASQSVSSDLAWYQQKPGQSPRLLIYGASTRATGIPARFSGSGSGTEFTLTISSLQSEDFAVYYCQQYNNWPP

SEQ ID NO: 7573 - protein, 108 aa, Homo sapiens
EIVMTQSPATLSVSPGERATLSCRASQSVSSDLAWYQQKPGQSPRLLIYGASTRATGIPARFSGSGSGTEFTLTISSLQSEDFAVYYCQQYNNWPPLTFGGGTKVEIK

SEQ ID NO: 7574 - protein, 96 aa, Homo sapiens
EIVMTQSPATLSVSPGERATLSCRASQSVSSDLAWYRQKPGQAPRLLIYGASTRATGIPARFSGSGSGTEFTLTISSLQSEDFAVYYCQQYNNWPP

SEQ ID NO: 7575 - protein, 108 aa, Homo sapiens
EIVMTQSPATLSVSPGERATLSCRASQSVSSDLAWYRQKPGQAPRLLIYGASTRATGIPARFSGSGSGTEFTLTISSLQSEDFAVYYCQQYNNWPPITFGQGTRLEIK

SEQ ID NO: 7576 - protein, 95 aa, Homo sapiens
EIVMTQSPATLSVSPGERATLSCRASQSVSSNCAWYQQKPGQAPRLLMSGASTRATGVPARFSGSGSGTEFTLTISSMQSEDFAVYYCQQYNDWP

SEQ ID NO: 7577 - protein, 107 aa, Homo sapiens
EIVMTQSPATLSVSPGERATLSCRASQSVSSNCAWYQQKPGQAPRLLMSGASTRATGVPARFSGSGSGTEFTLTISSMQSEDFAVYYCQQYNDWPRTFGQGTKLEIK

SEQ ID NO: 7578 - protein, 95 aa, Homo sapiens
EIVMTQSPATLSVSPGERATLSCRASQSVSSNLAWFQQKPGQAPRLLIYGASTRATGIPARFSGSGSGTEFTLTISSLQSEDFAVYYCQQYNDWP

SEQ ID NO: 7579 - protein, 107 aa, Homo sapiens
EIVMTQSPATLSVSPGERATLSCRASQSVSSNLAWFQQKPGQAPRLLIYGASTRATGIPARFSGSGSGTEFTLTISSLQSEDFAVYYCQQYNDWPRGFGQGTKVEIK

SEQ ID NO: 7580 - protein, 95 aa, Homo sapiens
EIVMTQSPATLSVSPGERATLSCRASQSVSSNLAWYQHKPGQAPRLLIYGASTRATGIPARFSGSGSGTEFTLTITSLQSEDFAVYYCHQYYNWP

SEQ ID NO: 7581 - protein, 107 aa, Homo sapiens
EIVMTQSPATLSVSPGERATLSCRASQSVSSNLAWYQHKPGQAPRLLIYGASTRATGIPARFSGSGSGTEFTLTITSLQSEDFAVYYCHQYYNWPRTFGQGTKVEIK

SEQ ID NO: 7582 - protein, 95 aa, Homo sapiens
EIVMTQSPATLSVSPGERATLSCRASQSVSSNLAWYQHKPGQAPRLLIYGASTRATGIPARFSGTGSGTEFTLTISSLQSEDFAVYYCQQYNDWP

SEQ ID NO: 7583 - protein, 107 aa, Homo sapiens
EIVMTQSPATLSVSPGERATLSCRASQSVSSNLAWYQHKPGQAPRLLIYGASTRATGIPARFSGTGSGTEFTLTISSLQSEDFAVYYCQQYNDWPRTFGQGTKVEIK

SEQ ID NO: 7584 - protein, 95 aa, Homo sapiens
EIVMTQSPATLSVSPGERATLSCRASQSVSSNLAWYQQKPGQAPRLLFYGASTRATGIPARFSGSGSGTEFTLTISSLQAEDFAVYHCQQYNMWP

SEQ ID NO: 7585 - protein, 106 aa, Homo sapiens
EIVMTQSPATLSVSPGERATLSCRASQSVSSNLAWYQQKPGQAPRLLFYGASTRATGIPARFSGSGSGTEFTLTISSLQAEDFAVYHCQQYNMWPWTFGQGTKVEI

SEQ ID NO: 7586 - protein, 96 aa, Homo sapiens
EIVMTQSPATLSVSPGERATLSCRASQSVSSNLAWYQQKPGQAPRLLIYAASTRATGIPARFSGSGSGTEFTLTISSMQPEDFAVYYCQQYNNWPP

SEQ ID NO: 7587 - protein, 108 aa, Homo sapiens
EIVMTQSPATLSVSPGERATLSCRASQSVSSNLAWYQQKPGQAPRLLIYAASTRATGIPARFSGSGSGTEFTLTISSMQPEDFAVYYCQQYNNWPPLTFGGGTKVEIK

SEQ ID NO: 7588 - protein, 96 aa, Homo sapiens
EIVMTQSPATLSVSPGERATLSCRASQSVSSNLAWYQQKPGQAPRLLIYGASIRATGIPARFSASGSGTEFTLTISILQSEDFAVYYCQQYTNWPP

SEQ ID NO: 7589 - protein, 108 aa, Homo sapiens
EIVMTQSPATLSVSPGERATLSCRASQSVSSNLAWYQQKPGQAPRLLIYGASIRATGIPARFSASGSGTEFTLTISILQSEDFAVYYCQQYTNWPPITFGQGTRLEIK

SEQ ID NO: 7590 - protein, 96 aa, Homo sapiens
EIVMTQSPATLSVSPGERATLSCRASQSVSSNLAWYQQKPGQAPRLLIYGASNRATGVPARFSGSGSGTEFTLTISSLQSGDFAVYYCQQYNNWPP

SEQ ID NO: 7591 - protein, 108 aa, Homo sapiens
EIVMTQSPATLSVSPGERATLSCRASQSVSSNLAWYQQKPGQAPRLLIYGASNRATGVPARFSGSGSGTEFTLTISSLQSGDFAVYYCQQYNNWPPITFGQGTRLEIK

SEQ ID NO: 7592 - protein, 96 aa, Homo sapiens
EIVMTQSPATLSVSPGERATLSCRASQSVSSNLAWYQQKPGQAPRLLIYGASSRATGIPARFTGSGSGTEFTLTISSLQSEDFAFYYCQQYNNWPP

SEQ ID NO: 7593 - protein, 108 aa, Homo sapiens
EIVMTQSPATLSVSPGERATLSCRASQSVSSNLAWYQQKPGQAPRLLIYGASSRATGIPARFTGSGSGTEFTLTISSLQSEDFAFYYCQQYNNWPPLTFGGGTKVEIK

SEQ ID NO: 7594 - protein, 95 aa, Homo sapiens
EIVMTQSPATLSVSPGERATLSCRASQSVSSNLAWYQQKPGQAPRLLIYGASSRATGIPDRFSGSGSGTDFTLTISRLEPEDFAVYYCQQYGSSP

SEQ ID NO: 7595 - protein, 108 aa, Homo sapiens
EIVMTQSPATLSVSPGERATLSCRASQSVSSNLAWYQQKPGQAPRLLIYGASSRATGIPDRFSGSGSGTDFTLTISRLEPEDFAVYYCQQYGSSPGFTFGPGTKVDIK

SEQ ID NO: 7596 - protein, 95 aa, Homo sapiens
EIVMTQSPATLSVSPGERATLSCRASQSVSSNLAWYQQKPGQAPRLLIYGASTRAIGIPARFSGSGSGTEFTLTVSSMQSEDFAVYYCQQYNNWP

SEQ ID NO: 7597 - protein, 107 aa, Homo sapiens
EIVMTQSPATLSVSPGERATLSCRASQSVSSNLAWYQQKPGQAPRLLIYGASTRAIGIPARFSGSGSGTEFTLTVSSMQSEDFAVYYCQQYNNWPRTFGQGTKVEIK

SEQ ID NO: 7598 - protein, 95 aa, Homo sapiens
EIVMTQSPATLSVSPGERATLSCRASQSVSSNLAWYQQKPGQAPRLLIYGASTRAPGIPASFSGSGSGTEFTLTISNLQSDDFAIYYCQQYNDWP

SEQ ID NO: 7599 - protein, 107 aa, Homo sapiens
EIVMTQSPATLSVSPGERATLSCRASQSVSSNLAWYQQKPGQAPRLLIYGASTRAPGIPASFSGSGSGTEFTLTISNLQSDDFAIYYCQQYNDWPKTFGQGTKVEIK

SEQ ID NO: 7600 - protein, 96 aa, Homo sapiens
EIVMTQSPATLSVSPGERATLSCRASQSVSSNLAWYQQKPGQAPRLLIYGASTRATDIPARFSGSGSGTEFTLTISSLQSEDFAVYYCQQYNNWPP

SEQ ID NO: 7601 - protein, 108 aa, Homo sapiens
EIVMTQSPATLSVSPGERATLSCRASQSVSSNLAWYQQKPGQAPRLLIYGASTRATDIPARFSGSGSGTEFTLTISSLQSEDFAVYYCQQYNNWPPWTFGQGTKVEIK

SEQ ID NO: 7602 - protein, 96 aa, Homo sapiens
EIVMTQSPATLSVSPGERATLSCRASQSVSSNLAWYQQKPGQAPRLLIYGASTRATGFPARFSGSGSGTEFTFTISSLQSEDFAVYYCQQYDNRPP

SEQ ID NO: 7603 - protein, 107 aa, Homo sapiens
EIVMTQSPATLSVSPGERATLSCRASQSVSSNLAWYQQKPGQAPRLLIYGASTRATGFPARFSGSGSGTEFTFTISSLQSEDFAVYYCQQYDNRPPTFGQGTKVEIK

SEQ ID NO: 7604 - protein, 95 aa, Homo sapiens
EIVMTQSPATLSVSPGERATLSCRASQSVSSNLAWYQQKPGQAPRLLIYGASTRATGFPARFSGSGSGTEFTLTISSLQSEDFAVYYCQQYYSWP

SEQ ID NO: 7605 - protein, 107 aa, Homo sapiens
EIVMTQSPATLSVSPGERATLSCRASQSVSSNLAWYQQKPGQAPRLLIYGASTRATGFPARFSGSGSGTEFTLTISSLQSEDFAVYYCQQYYSWPRSFGQGTKLEIK

SEQ ID NO: 7606 - protein, 96 aa, Homo sapiens
EIVMTQSPATLSVSPGERATLSCRASQSVSSNLAWYQQKPGQAPRLLIYGASTRATGIPARFSGSGSGTDFTLTISSLQSEDFAVYYCQQYNNWPP

SEQ ID NO: 7607 - protein, 108 aa, Homo sapiens
EIVMTQSPATLSVSPGERATLSCRASQSVSSNLAWYQQKPGQAPRLLIYGASTRATGIPARFSGSGSGTDFTLTISSLQSEDFAVYYCQQYNNWPPYTFGQGTKLEIK

SEQ ID NO: 7608 - protein, 94 aa, Homo sapiens
EIVMTQSPATLSVSPGERATLSCRASQSVSSNLAWYQQKPGQAPRLLIYGASTRATGIPARFSGSGSGTEFTLTISSLQSEDFAFYYCQHYNNW

SEQ ID NO: 7609 - protein, 107 aa, Homo sapiens
EIVMTQSPATLSVSPGERATLSCRASQSVSSNLAWYQQKPGQAPRLLIYGASTRATGIPARFSGSGSGTEFTLTISSLQSEDFAFYYCQHYNNWLYTFGQGTKLEIK

SEQ ID NO: 7610 - protein, 96 aa, Homo sapiens
EIVMTQSPATLSVSPGERATLSCRASQSVSSNLAWYQQKPGQAPRLLIYGASTRATGIPARFSGSGSGTEFTLTISSLQSEDFAVYYCQQYNHWPP

SEQ ID NO: 7611 - protein, 108 aa, Homo sapiens
EIVMTQSPATLSVSPGERATLSCRASQSVSSNLAWYQQKPGQAPRLLIYGASTRATGIPARFSGSGSGTEFTLTISSLQSEDFAVYYCQQYNHWPPLTFGGGTKVEIK

SEQ ID NO: 7612 - protein, 95 aa, Homo sapiens
EIVMTQSPATLSVSPGERATLSCRASQSVSSNLAWYQQKPGQAPRLLIYGASTRATGIPARFSGSGSGTEFTLTISSLQSEDFAVYYCQQYNKWP

SEQ ID NO: 7613 - protein, 107 aa, Homo sapiens
EIVMTQSPATLSVSPGERATLSCRASQSVSSNLAWYQQKPGQAPRLLIYGASTRATGIPARFSGSGSGTEFTLTISSLQSEDFAVYYCQQYNKWPLTFGPGTKVDIK

SEQ ID NO: 7614 - protein, 94 aa, Homo sapiens
EIVMTQSPATLSVSPGERATLSCRASQSVSSNLAWYQQKPGQAPRLLIYGASTRATGIPARFSGSGSGTEFTLTISSLQSEDFAVYYCQQYNNW

SEQ ID NO: 7615 - protein, 95 aa, Homo sapiens
EIVMTQSPATLSVSPGERATLSCRASQSVSSNLAWYQQKPGQAPRLLIYGASTRATGIPARFSGSGSGTEFTLTISSLQSEDFAVYYCQQYNNWP

SEQ ID NO: 7616 - protein, 107 aa, Homo sapiens
EIVMTQSPATLSVSPGERATLSCRASQSVSSNLAWYQQKPGQAPRLLIYGASTRATGIPARFSGSGSGTEFTLTISSLQSEDFAVYYCQQYNNWPLTFGGGTKVEIK

SEQ ID NO: 7617 - protein, 108 aa, Homo sapiens
EIVMTQSPATLSVSPGERATLSCRASQSVSSNLAWYQQKPGQAPRLLIYGASTRATGIPARFSGSGSGTEFTLTISSLQSEDFAVYYCQQYNNWPMYTFGQGTKLEIK

SEQ ID NO: 7618 - protein, 96 aa, Homo sapiens
EIVMTQSPATLSVSPGERATLSCRASQSVSSNLAWYQQKPGQAPRLLIYGASTRATGIPARFSGSGSGTEFTLTISSLQSEDFAVYYCQQYNNWPP

SEQ ID NO: 7619 - protein, 108 aa, Homo sapiens
EIVMTQSPATLSVSPGERATLSCRASQSVSSNLAWYQQKPGQAPRLLIYGASTRATGIPARFSGSGSGTEFTLTISSLQSEDFAVYYCQQYNNWPPATFGQGTKVEIK

SEQ ID NO: 7620 - protein, 108 aa, Homo sapiens
EIVMTQSPATLSVSPGERATLSCRASQSVSSNLAWYQQKPGQAPRLLIYGASTRATGIPARFSGSGSGTEFTLTISSLQSEDFAVYYCQQYNNWPPDTFGQGTKLEIK

SEQ ID NO: 7621 - protein, 108 aa, Homo sapiens
EIVMTQSPATLSVSPGERATLSCRASQSVSSNLAWYQQKPGQAPRLLIYGASTRATGIPARFSGSGSGTEFTLTISSLQSEDFAVYYCQQYNNWPPITFGQGTRLEIK

SEQ ID NO: 7622 - protein, 108 aa, Homo sapiens
EIVMTQSPATLSVSPGERATLSCRASQSVSSNLAWYQQKPGQAPRLLIYGASTRATGIPARFSGSGSGTEFTLTISSLQSEDFAVYYCQQYNNWPPLTFAGGTKVEIK

SEQ ID NO: 7623 - protein, 108 aa, Homo sapiens
EIVMTQSPATLSVSPGERATLSCRASQSVSSNLAWYQQKPGQAPRLLIYGASTRATGIPARFSGSGSGTEFTLTISSLQSEDFAVYYCQQYNNWPPLTFGGGTKVEIK

SEQ ID NO: 7624 - protein, 109 aa, Homo sapiens
EIVMTQSPATLSVSPGERATLSCRASQSVSSNLAWYQQKPGQAPRLLIYGASTRATGIPARFSGSGSGTEFTLTISSLQSEDFAVYYCQQYNNWPPRLTFGGGTKVEIK

SEQ ID NO: 7625 - protein, 107 aa, Homo sapiens
EIVMTQSPATLSVSPGERATLSCRASQSVSSNLAWYQQKPGQAPRLLIYGASTRATGIPARFSGSGSGTEFTLTISSLQSEDFAVYYCQQYNNWPPTFGQGTKVEIK

SEQ ID NO: 7626 - protein, 107 aa, Homo sapiens
EIVMTQSPATLSVSPGERATLSCRASQSVSSNLAWYQQKPGQAPRLLIYGASTRATGIPARFSGSGSGTEFTLTISSLQSEDFAVYYCQQYNNWPQTFGQGTKVEIK

SEQ ID NO: 7627 - protein, 107 aa, Homo sapiens
EIVMTQSPATLSVSPGERATLSCRASQSVSSNLAWYQQKPGQAPRLLIYGASTRATGIPARFSGSGSGTEFTLTISSLQSEDFAVYYCQQYNNWPRTFGQGTKVEIK

SEQ ID NO: 7628 - protein, 107 aa, Homo sapiens
EIVMTQSPATLSVSPGERATLSCRASQSVSSNLAWYQQKPGQAPRLLIYGASTRATGIPARFSGSGSGTEFTLTISSMQSEDFAVYYCQQYNNWPLTFGGGTKVEIK

SEQ ID NO: 7629 - protein, 108 aa, Homo sapiens
EIVMTQSPATLSVSPGERATLSCRASQSVSSNLAWYQQKPGQAPRLLIYGASTRATGIPARFSGSGSGTEFTLTISSMQSEDFAVYYCQQYNNWPMYTFGQGTKLEIK

SEQ ID NO: 7630 - protein, 108 aa, Homo sapiens
EIVMTQSPATLSVSPGERATLSCRASQSVSSNLAWYQQKPGQAPRLLIYGASTRATGIPARFSGSGSGTEFTLTISSMQSEDFAVYYCQQYNNWPQWTFGQGTKVEIK

SEQ ID NO: 7631 - protein, 107 aa, Homo sapiens
EIVMTQSPATLSVSPGERATLSCRASQSVSSNLAWYQQKPGQAPRLLIYGASTRATGIPARFSGSGSGTEFTLTISSMQSEDFAVYYCQQYNNWPRTFGQGTKLEIK

SEQ ID NO: 7632 - protein, 106 aa, Homo sapiens
EIVMTQSPATLSVSPGERATLSCRASQSVSSNLAWYQQKPGQAPRLLIYGASTRATGIPARFSGSGSGTEFTLTISSMQSEDFAVYYCQQYNNWPVFGGGTKVEIK

SEQ ID NO: 7633 - protein, 96 aa, Homo sapiens
EIVMTQSPATLSVSPGERATLSCRASQSVSSNLAWYQQKPGQAPRLLIYGASTRATGIPPRFSGSGSGTEFSLTISSLQSEDFAVYYCQQYNNWPP

SEQ ID NO: 7634 - protein, 108 aa, Homo sapiens
EIVMTQSPATLSVSPGERATLSCRASQSVSSNLAWYQQKPGQAPRLLIYGASTRATGIPPRFSGSGSGTEFSLTISSLQSEDFAVYYCQQYNNWPPITFGQGTRLEIK

SEQ ID NO: 7635 - protein, 96 aa, Homo sapiens
EIVMTQSPATLSVSPGERATLSCRASQSVSSNLAWYQQKPGQAPRLLIYGASTRATGISVRFTGSGSGTEFTLTISSLQSEDFAVYYCQQYNNWPP

SEQ ID NO: 7636 - protein, 108 aa, Homo sapiens
EIVMTQSPATLSVSPGERATLSCRASQSVSSNLAWYQQKPGQAPRLLIYGASTRATGISVRFTGSGSGTEFTLTISSLQSEDFAVYYCQQYNNWPPLTFGGGTKVEIK

SEQ ID NO: 7637 - protein, 96 aa, Homo sapiens
EIVMTQSPATLSVSPGERATLSCRASQSVSSNLAWYQQKPGQAPRLLIYGASTRATGVPARFSGSGSGTEFTLTISSLQSEDFAVYYCQQYNNWPP

SEQ ID NO: 7638 - protein, 108 aa, Homo sapiens
EIVMTQSPATLSVSPGERATLSCRASQSVSSNLAWYQQKPGQAPRLLIYGASTRATGVPARFSGSGSGTEFTLTISSLQSEDFAVYYCQQYNNWPPLTFGGGTKVEIK

SEQ ID NO: 7639 - protein, 96 aa, Homo sapiens
EIVMTQSPATLSVSPGERATLSCRASQSVSSNLAWYQQKPGQAPRLLIYGTSTRATGIPARFSGSGSGTEFTLTISSLQSEDFAVYYCQQYNNWPP

SEQ ID NO: 7640 - protein, 108 aa, Homo sapiens
EIVMTQSPATLSVSPGERATLSCRASQSVSSNLAWYQQKPGQAPRLLIYGTSTRATGIPARFSGSGSGTEFTLTISSLQSEDFAVYYCQQYNNWPPLTFGGGTKVEIK

SEQ ID NO: 7641 - protein, 94 aa, Homo sapiens
EIVMTQSPATLSVSPGERATLSCRASQSVSSNLAWYQQKPGQAPRLLIYGTSTRATGIPARFSGSGSGTEFTLTISSLQSEDFAVYYCQQYNSW

SEQ ID NO: 7642 - protein, 107 aa, Homo sapiens
EIVMTQSPATLSVSPGERATLSCRASQSVSSNLAWYQQKPGQAPRLLIYGTSTRATGIPARFSGSGSGTEFTLTISSLQSEDFAVYYCQQYNSWLITFGQGTRLEIK

SEQ ID NO: 7643 - protein, 96 aa, Homo sapiens
EIVMTQSPATLSVSPGERATLSCRASQSVSSNLAWYQQKPGQAPRLLLYGASTRATGIPARFSGSGSGTEFTLTISSLQSEDFAVYYCQQYNNWPP

SEQ ID NO: 7644 - protein, 108 aa, Homo sapiens
EIVMTQSPATLSVSPGERATLSCRASQSVSSNLAWYQQKPGQAPRLLLYGASTRATGIPARFSGSGSGTEFTLTISSLQSEDFAVYYCQQYNNWPPITFGQGTRLEIK

SEQ ID NO: 7645 - protein, 96 aa, Homo sapiens
EIVMTQSPATLSVSPGERATLSCRASQSVSSNLAWYQQKPGQPPRLLIYGASTRATGIPARFTGSGSGTEFTLTISSLQSEDFAVYYCQQYNNWPP

SEQ ID NO: 7646 - protein, 108 aa, Homo sapiens
EIVMTQSPATLSVSPGERATLSCRASQSVSSNLAWYQQKPGQPPRLLIYGASTRATGIPARFTGSGSGTEFTLTISSLQSEDFAVYYCQQYNNWPPLTFGGGTKVEIK

SEQ ID NO: 7647 - protein, 96 aa, Homo sapiens
EIVMTQSPATLSVSPGERATLSCRASQSVSSNLAWYQQKVGQAPRLLIYGASTRATGIPPRFSGSGSGTEFTLTISSLQSEDFAVYYCQQYNNWPP

SEQ ID NO: 7648 - protein, 108 aa, Homo sapiens
EIVMTQSPATLSVSPGERATLSCRASQSVSSNLAWYQQKVGQAPRLLIYGASTRATGIPPRFSGSGSGTEFTLTISSLQSEDFAVYYCQQYNNWPPITFGQGTRLEIK

SEQ ID NO: 7649 - protein, 95 aa, Homo sapiens
EIVMTQSPATLSVSPGERATLSCRASQSVSSSLAWYQQKPGQAPRLLIYGASTRATGIPARFSGSGSGTEFTLTISSLQSEDFAVFYCQQYNNWP

SEQ ID NO: 7650 - protein, 107 aa, Homo sapiens
EIVMTQSPATLSVSPGERATLSCRASQSVSSSLAWYQQKPGQAPRLLIYGASTRATGIPARFSGSGSGTEFTLTISSLQSEDFAVFYCQQYNNWPRTFGQGTKVEIK

SEQ ID NO: 7651 - protein, 94 aa, Homo sapiens
EIVMTQSPATLSVSPGERATLSCRASQSVSSSLAWYQQKPGQAPRLLIYGASTRATGIPARFSGSGSGTEFTLTISSLQSEDFAVYYCHQYANW

SEQ ID NO: 7652 - protein, 107 aa, Homo sapiens
EIVMTQSPATLSVSPGERATLSCRASQSVSSSLAWYQQKPGQAPRLLIYGASTRATGIPARFSGSGSGTEFTLTISSLQSEDFAVYYCHQYANWLYSFGQGTKLEIK

SEQ ID NO: 7653 - protein, 96 aa, Homo sapiens
EIVMTQSPATLSVSPGERATLSCRASQSVSSSLAWYQQKPGQAPRLLIYGASTRATGIPARFSGSGSGTEFTLTISSMQSEDFAIYYCQQYHTWPP

SEQ ID NO: 7654 - protein, 107 aa, Homo sapiens
EIVMTQSPATLSVSPGERATLSCRASQSVSSSLAWYQQKPGQAPRLLIYGASTRATGIPARFSGSGSGTEFTLTISSMQSEDFAIYYCQQYHTWPPWTFGQGTKVEI

SEQ ID NO: 7655 - protein, 96 aa, Homo sapiens
EIVMTQSPATLSVSPGERATLSCRASQSVSSSLAWYQQKPGQAPRLLVYGASTRATGIPPRFSGSGSGTEFTLTINNVQSEDFAVYYCQQYHNWPP

SEQ ID NO: 7656 - protein, 108 aa, Homo sapiens
EIVMTQSPATLSVSPGERATLSCRASQSVSSSLAWYQQKPGQAPRLLVYGASTRATGIPPRFSGSGSGTEFTLTINNVQSEDFAVYYCQQYHNWPPLTFGGGTKVEIK

SEQ ID NO: 7657 - protein, 96 aa, Homo sapiens
EIVMTQSPATLSVSPGERATLSCRASQSVSSSLAWYQQTPGQAPRLLIYGASTRATGIPARFSGSGSGTEFTLTISSMQSEDFAVYYCQQYNNWPP

SEQ ID NO: 7658 - protein, 108 aa, Homo sapiens
EIVMTQSPATLSVSPGERATLSCRASQSVSSSLAWYQQTPGQAPRLLIYGASTRATGIPARFSGSGSGTEFTLTISSMQSEDFAVYYCQQYNNWPPVTFGQGTRLEIK

SEQ ID NO: 7659 - protein, 96 aa, Homo sapiens
EIVMTQSPATLSVSPGERATLSCRASQSVSSSSLAWYQQKPGQAPRLLIYDASSRATGIPDRFSGSGSGTDFTLTISGLEPEDFAVYYCQHYGSSS

SEQ ID NO: 7660 - protein, 108 aa, Homo sapiens
EIVMTQSPATLSVSPGERATLSCRASQSVSSSSLAWYQQKPGQAPRLLIYDASSRATGIPDRFSGSGSGTDFTLTISGLEPEDFAVYYCQHYGSSSLTFGGGTKVEIK

SEQ ID NO: 7661 - protein, 96 aa, Homo sapiens
EIVMTQSPATLSVSPGERATLSCRASQSVSTNLAWYHQKPGQAPRLLIYGASTRATGIPARFSGTGSGTEFTLTINSVRSEDFAIYYCQQYHNWPP

SEQ ID NO: 7662 - protein, 108 aa, Homo sapiens
EIVMTQSPATLSVSPGERATLSCRASQSVSTNLAWYHQKPGQAPRLLIYGASTRATGIPARFSGTGSGTEFTLTINSVRSEDFAIYYCQQYHNWPPLTFGGGTKVEIK

SEQ ID NO: 7663 - protein, 96 aa, Homo sapiens
EIVMTQSPATLSVSPGERATLSCRASQSVSTNLAWYRQKPGQPPRLLIYGASTRATGIPARFSGSGSGTEFTLTISSLQSEDFAVYYCQQYNNWPP

SEQ ID NO: 7664 - protein, 108 aa, Homo sapiens
EIVMTQSPATLSVSPGERATLSCRASQSVSTNLAWYRQKPGQPPRLLIYGASTRATGIPARFSGSGSGTEFTLTISSLQSEDFAVYYCQQYNNWPPLTFGGGTKVEIK

SEQ ID NO: 7665 - protein, 96 aa, Homo sapiens
EIVMTQSPATLSVSPGERATLSCRASQSVTDNLAWYQQKPGQAPRLLIYGASTRATGVPARFSGSGSGTEFTLTISSLQSEDFAVYYCQQYNYWPP

SEQ ID NO: 7666 - protein, 108 aa, Homo sapiens
EIVMTQSPATLSVSPGERATLSCRASQSVTDNLAWYQQKPGQAPRLLIYGASTRATGVPARFSGSGSGTEFTLTISSLQSEDFAVYYCQQYNYWPPWTFGQGTKVEIK

SEQ ID NO: 7667 - protein, 96 aa, Homo sapiens
EIVMTQSPATLSVSPGERATLSCRASQSVTSNLAWYQQKPGQAPRLLIYGASTRATGIPARFSGSGSGTEFTLTISSLQSEDFAVYYCQQYDNWPP

SEQ ID NO: 7668 - protein, 108 aa, Homo sapiens
EIVMTQSPATLSVSPGERATLSCRASQSVTSNLAWYQQKPGQAPRLLIYGASTRATGIPARFSGSGSGTEFTLTISSLQSEDFAVYYCQQYDNWPPWTFGQGTKVEIK

SEQ ID NO: 7669 - protein, 96 aa, Homo sapiens
EIVMTQSPATLSVSPGERATLSCRASQSVTSNLAWYQQKPGQAPRLLIYGASTRATGIPARFSGSGSGTEFTLTISSLQSEDFAVYYCQQYNNWPP

SEQ ID NO: 7670 - protein, 108 aa, Homo sapiens
EIVMTQSPATLSVSPGERATLSCRASQSVTSNLAWYQQKPGQAPRLLIYGASTRATGIPARFSGSGSGTEFTLTISSLQSEDFAVYYCQQYNNWPPITFGPGTKVDIQ

SEQ ID NO: 7671 - protein, 96 aa, Homo sapiens
EIVMTQSPATLSVSPGERATLSCRASQSVTSNLVWYQQKPGQAPRLLIYDASTRATGIPARFSGSGSGTEFTLTISSLQSEDFAVYYCQQHNNWPP

SEQ ID NO: 7672 - protein, 108 aa, Homo sapiens
EIVMTQSPATLSVSPGERATLSCRASQSVTSNLVWYQQKPGQAPRLLIYDASTRATGIPARFSGSGSGTEFTLTISSLQSEDFAVYYCQQHNNWPPITFGQGTRLEIK

SEQ ID NO: 7673 - protein, 96 aa, Homo sapiens
EIVMTQSPATLSVSPGERATLSCRASQTIGTSLAWYQQKPGRAPRLLISGASTRATGVPARFSGSGSGTEFTLTISSMQSEDFAVYYCQQYSNWPP

SEQ ID NO: 7674 - protein, 108 aa, Homo sapiens
EIVMTQSPATLSVSPGERATLSCRASQTIGTSLAWYQQKPGRAPRLLISGASTRATGVPARFSGSGSGTEFTLTISSMQSEDFAVYYCQQYSNWPPITFGQGTRLEIK

SEQ ID NO: 7675 - protein, 96 aa, Homo sapiens
EIVMTQSPATLSVSPGERATLSCRASQTIRSDLAWYQQKPGQPPRLIIYGASTRATGIPARFSGSGSGTEFTLTISSLQSEDSAVYFCQQYNNWPP

SEQ ID NO: 7676 - protein, 108 aa, Homo sapiens
EIVMTQSPATLSVSPGERATLSCRASQTIRSDLAWYQQKPGQPPRLIIYGASTRATGIPARFSGSGSGTEFTLTISSLQSEDSAVYFCQQYNNWPPLTFGGGTKVEIK

SEQ ID NO: 7677 - protein, 96 aa, Homo sapiens
EIVMTQSPATLSVSPGERATLSCRASQTVTNNLAWYQQKPGQAPRLLIYGASTRATGIPARFSGSGSGTEFTLTISSLQSEDYAVYYCQQYNNWPP

SEQ ID NO: 7678 - protein, 108 aa, Homo sapiens
EIVMTQSPATLSVSPGERATLSCRASQTVTNNLAWYQQKPGQAPRLLIYGASTRATGIPARFSGSGSGTEFTLTISSLQSEDYAVYYCQQYNNWPPLTFGGGTKVEIK

SEQ ID NO: 7679 - protein, 95 aa, Homo sapiens
EIVMTQSPATLSVSPGERATLSCRGSQSVSSNLAWYQQKPGQAPRLLIYGASTRATDIPARFSGIGSGTEFTLTISSLQSEDFAVYYCQQYNNWP

SEQ ID NO: 7680 - protein, 107 aa, Homo sapiens
EIVMTQSPATLSVSPGERATLSCRGSQSVSSNLAWYQQKPGQAPRLLIYGASTRATDIPARFSGIGSGTEFTLTISSLQSEDFAVYYCQQYNNWPITFGQGTRLDIK

SEQ ID NO: 7681 - protein, 96 aa, Homo sapiens
EIVMTQSPATLSVSPGERATLSCRSSQTITDHLAWYQQKPGQAPRLLIYGASTRASGIPARFSGSGSGTEFTLTISSLQSEDFAIYYCQQYYNWPP

SEQ ID NO: 7682 - protein, 108 aa, Homo sapiens
EIVMTQSPATLSVSPGERATLSCRSSQTITDHLAWYQQKPGQAPRLLIYGASTRASGIPARFSGSGSGTEFTLTISSLQSEDFAIYYCQQYYNWPPLTFGGGTKVEIK

SEQ ID NO: 7683 - protein, 92 aa, Homo sapiens
EIVMTQSPATLSVSPGERATLSCRTSQSVSSSLAWYQQKHGQGPRLLIYGASTRATGIPARFSGSGSGTEFTLTISSLQSEDSAVYYCQQYN

SEQ ID NO: 7684 - protein, 112 aa, Homo sapiens
EIVMTQSPATLSVSPGERATLSCRTSQSVSSSLAWYQQKHGQGPRLLIYGASTRATGIPARFSGSGSGTEFTLTISSLQSEDSAVYYCQQYNKQDNKWPLITFGGGTKVEIK

SEQ ID NO: 7685 - protein, 95 aa, Homo sapiens
EIVMTQSPATLSVSPGERATLSCWANQSVSSNLAWYQQKPGQAPRLLIYGASTRATGIPARFSGSGSGTEFTLTISSLQSEDFAVYYCQQYNDWP

SEQ ID NO: 7686 - protein, 107 aa, Homo sapiens
EIVMTQSPATLSVSPGERATLSCWANQSVSSNLAWYQQKPGQAPRLLIYGASTRATGIPARFSGSGSGTEFTLTISSLQSEDFAVYYCQQYNDWPRTFGQGTKVEIK

SEQ ID NO: 7687 - protein, 96 aa, Homo sapiens
EIVMTQSPATLSVSPGERATLSCWASQSVSSNLAWYQQKPGQAPRLLIYGASTRATGIPARFSGSGSGTEFTLTISSLQSEDFAVYYCQQYNNWPP

SEQ ID NO: 7688 - protein, 108 aa, Homo sapiens
EIVMTQSPATLSVSPGERATLSCWASQSVSSNLAWYQQKPGQAPRLLIYGASTRATGIPARFSGSGSGTEFTLTISSLQSEDFAVYYCQQYNNWPPLTFGGGTKLEIK

SEQ ID NO: 7689 - protein, 96 aa, Homo sapiens
EIVMTQSPATLSVSPGERATLTCRASQSVSTKLAWYQQKPGQAPRLLIHGASTRATGIPARFSGSGSGTEFTLTISSMQPEDFAVYYCQQYNNWPP

SEQ ID NO: 7690 - protein, 108 aa, Homo sapiens
EIVMTQSPATLSVSPGERATLTCRASQSVSTKLAWYQQKPGQAPRLLIHGASTRATGIPARFSGSGSGTEFTLTISSMQPEDFAVYYCQQYNNWPPVTFGGGTKVEIK

SEQ ID NO: 7691 - protein, 96 aa, Homo sapiens
EIVMTQSPATLSVSPGERGTLSCRASQSVSNNLAWYQQKPGQAPRLLIYGASTRATGVPARFGGSGSGTEFTLTISSIQSEDFAVYYCQQYNNWPP

SEQ ID NO: 7692 - protein, 108 aa, Homo sapiens
EIVMTQSPATLSVSPGERGTLSCRASQSVSNNLAWYQQKPGQAPRLLIYGASTRATGVPARFGGSGSGTEFTLTISSIQSEDFAVYYCQQYNNWPPLTFGGGTTVEIK

SEQ ID NO: 7693 - protein, 96 aa, Homo sapiens
EIVMTQSPATLSVSPGERGTLSCRASQSVSSNLAWYQQKPGQPPRLLIYDASTRATGIPARFSGSGSGTEFTLTISSMQSEDFAVYFCQQYYNWPP

SEQ ID NO: 7694 - protein, 108 aa, Homo sapiens
EIVMTQSPATLSVSPGERGTLSCRASQSVSSNLAWYQQKPGQPPRLLIYDASTRATGIPARFSGSGSGTEFTLTISSMQSEDFAVYFCQQYYNWPPITFGPGTKVDIK

SEQ ID NO: 7695 - protein, 96 aa, Homo sapiens
EIVMTQSPATLSVSPGERTTLSCRASQNVGSNIAWYQQKPGQAPRLLIYGASTRASGIPARISGSGSGTEFTLTISSLQSEDFAVYYCQQYLNWPP

SEQ ID NO: 7696 - protein, 108 aa, Homo sapiens
EIVMTQSPATLSVSPGERTTLSCRASQNVGSNIAWYQQKPGQAPRLLIYGASTRASGIPARISGSGSGTEFTLTISSLQSEDFAVYYCQQYLNWPPITFGQGTRLEIK

SEQ ID NO: 7697 - protein, 96 aa, Homo sapiens
EIVMTQSPATLSVSPGERTTLSCRASQSVNSNLAWYQQKPGQAPRLLIYGASTRATGIPARFSGSGSGTEFTLTISSLQSEDFAVYYCQQYNNWPP

SEQ ID NO: 7698 - protein, 108 aa, Homo sapiens
EIVMTQSPATLSVSPGERTTLSCRASQSVNSNLAWYQQKPGQAPRLLIYGASTRATGIPARFSGSGSGTEFTLTISSLQSEDFAVYYCQQYNNWPPLTFGGGTRVEIK

SEQ ID NO: 7699 - protein, 96 aa, Homo sapiens
EIVMTQSPATLSVSPGERVTLSCRAGQSLTSDLAWYQQKPGQAPRLLIYDASTRATGVPARFSGSGSGTEFTLTISSLQSEDFAVYYCQQYHNWPP

SEQ ID NO: 7700 - protein, 108 aa, Homo sapiens
EIVMTQSPATLSVSPGERVTLSCRAGQSLTSDLAWYQQKPGQAPRLLIYDASTRATGVPARFSGSGSGTEFTLTISSLQSEDFAVYYCQQYHNWPPLTFGGGTKVEIK

SEQ ID NO: 7701 - protein, 96 aa, Homo sapiens
EIVMTQSPATLSVSPGERVTLSCRASQSINSNLAWYQKKPGQAPRLLIFGASTRAAGVPARFSGSGSGTEFILTISSLQSEDFAVYSCQQYYNWPP

SEQ ID NO: 7702 - protein, 107 aa, Homo sapiens
EIVMTQSPATLSVSPGERVTLSCRASQSINSNLAWYQKKPGQAPRLLIFGASTRAAGVPARFSGSGSGTEFILTISSLQSEDFAVYSCQQYYNWPPITFGQGTRVEI

SEQ ID NO: 7703 - protein, 95 aa, Homo sapiens
EIVMTQSPATLSVSPGERVTLSCRASQSVGSNLAWYQKKAGQAPRLLIYGPATRATGIPARFGGSGSGTEFTLTISSIQSEDFAIYYCQQYNNWP

SEQ ID NO: 7704 - protein, 107 aa, Homo sapiens
EIVMTQSPATLSVSPGERVTLSCRASQSVGSNLAWYQKKAGQAPRLLIYGPATRATGIPARFGGSGSGTEFTLTISSIQSEDFAIYYCQQYNNWPLTFGQGTKVEIK

SEQ ID NO: 7705 - protein, 96 aa, Homo sapiens
EIVMTQSPATLSVSPGERVTLSCRASQSVNSDLAWYQQKPGQAPRLLIYGASTRATGIPARFSGGGSGTEFTLTISSLQSEDFAVYYCQQYNNWPP

SEQ ID NO: 7706 - protein, 108 aa, Homo sapiens
EIVMTQSPATLSVSPGERVTLSCRASQSVNSDLAWYQQKPGQAPRLLIYGASTRATGIPARFSGGGSGTEFTLTISSLQSEDFAVYYCQQYNNWPPLTFGGGTKVEIK

SEQ ID NO: 7707 - protein, 96 aa, Homo sapiens
EIVMTQSPATLSVSPGERVTLSCRASQSVSGNLAWYQQKPGQAPRLLIYGASTRATDIPARFSGSGSGTEFTLTISSLQSEDFAVYYCQQYNNWPP

SEQ ID NO: 7708 - protein, 108 aa, Homo sapiens
EIVMTQSPATLSVSPGERVTLSCRASQSVSGNLAWYQQKPGQAPRLLIYGASTRATDIPARFSGSGSGTEFTLTISSLQSEDFAVYYCQQYNNWPPLTFGGGTKVEIK

SEQ ID NO: 7709 - protein, 95 aa, Homo sapiens
EIVMTQSPATLSVSPGERVTLSCRASQSVSSNLAWYQQKPGQAPRLLIYGASTRATGIPARFSGSGSGTEFTLTISSMQSEDFAIYYCQQYNNWP

SEQ ID NO: 7710 - protein, 107 aa, Homo sapiens
EIVMTQSPATLSVSPGERVTLSCRASQSVSSNLAWYQQKPGQAPRLLIYGASTRATGIPARFSGSGSGTEFTLTISSMQSEDFAIYYCQQYNNWPLTFGPGTKVDIK

SEQ ID NO: 7711 - protein, 96 aa, Homo sapiens
EIVMTQSPATLSVSPGERVTLSCRASQSVSSNLAWYQQKPGQAPRLLIYGATTRATGIPARFSGSGSGTEFTLTISSLQSEDFAVYYCQQSNNWPP

SEQ ID NO: 7712 - protein, 108 aa, Homo sapiens
EIVMTQSPATLSVSPGERVTLSCRASQSVSSNLAWYQQKPGQAPRLLIYGATTRATGIPARFSGSGSGTEFTLTISSLQSEDFAVYYCQQSNNWPPLTFGGGTKVEIK

SEQ ID NO: 7713 - protein, 96 aa, Homo sapiens
EIVMTQSPATLSVSPGERVTLSCRASQSVSSSLAWYQQKPGQAPRLLIYAASTRATGIPSSFSGSGSGTEFTLTISSLQSEDFAVYYCQQYNNWPP

SEQ ID NO: 7714 - protein, 108 aa, Homo sapiens
EIVMTQSPATLSVSPGERVTLSCRASQSVSSSLAWYQQKPGQAPRLLIYAASTRATGIPSSFSGSGSGTEFTLTISSLQSEDFAVYYCQQYNNWPPLTFGGGTKVEIK

SEQ ID NO: 7715 - protein, 96 aa, Homo sapiens
EIVMTQSPATLSVSPGERVTLSCRASQSVSVNLAWYQQKPGQAPRLLIYGASTRATGIPARFSGSGSGAEFTLTISSLQSEDFAIYYCQQYNNWPP

SEQ ID NO: 7716 - protein, 108 aa, Homo sapiens
EIVMTQSPATLSVSPGERVTLSCRASQSVSVNLAWYQQKPGQAPRLLIYGASTRATGIPARFSGSGSGAEFTLTISSLQSEDFAIYYCQQYNNWPPITFGQGTRLEIK

SEQ ID NO: 7717 - protein, 96 aa, Homo sapiens
EIVMTQSPATLSVSPGERVTLSCRASQTVTDSLAWYQHKPGQAPRLLIFGANTRATGIPARFSGSGSGTEFALTISSLQSEDFAVYYCQQYNDWPP

SEQ ID NO: 7718 - protein, 108 aa, Homo sapiens
EIVMTQSPATLSVSPGERVTLSCRASQTVTDSLAWYQHKPGQAPRLLIFGANTRATGIPARFSGSGSGTEFALTISSLQSEDFAVYYCQQYNDWPPWTFGQGTKVEIK

SEQ ID NO: 7719 - protein, 96 aa, Homo sapiens
EIVMTQSPATLSVSPGESATLSCRASQSVSSDLAWYQQKPGQAPSLLIHGASTRATGIPVRFSGSGSGTQFTLTITSLQSEDFAVYYCQQYNNWPP

SEQ ID NO: 7720 - protein, 108 aa, Homo sapiens
EIVMTQSPATLSVSPGESATLSCRASQSVSSDLAWYQQKPGQAPSLLIHGASTRATGIPVRFSGSGSGTQFTLTITSLQSEDFAVYYCQQYNNWPPITFGQGTRLEIK

SEQ ID NO: 7721 - protein, 96 aa, Homo sapiens
EIVMTQSPATLSVSPGESATLSCRASQSVSSNLAWYQQRPGQAPRLLIYGASTRATGIPARFSGSGSGTEFTLTISSLQSEDFAVYYCQQYNNWPP

SEQ ID NO: 7722 - protein, 107 aa, Homo sapiens
EIVMTQSPATLSVSPGESATLSCRASQSVSSNLAWYQQRPGQAPRLLIYGASTRATGIPARFSGSGSGTEFTLTISSLQSEDFAVYYCQQYNNWPPWTFGQGTKVEI

SEQ ID NO: 7723 - protein, 96 aa, Homo sapiens
EIVMTQSPATLSVSPGESATLSCRASQSVSTDLAWYQQKPGQAPRLLIYGASIRATDIPARFSGSGSGTEFTLTISRLQSEDFAVYYCQQYNNWPP

SEQ ID NO: 7724 - protein, 108 aa, Homo sapiens
EIVMTQSPATLSVSPGESATLSCRASQSVSTDLAWYQQKPGQAPRLLIYGASIRATDIPARFSGSGSGTEFTLTISRLQSEDFAVYYCQQYNNWPPITFGGGTTVEIK

SEQ ID NO: 7725 - protein, 96 aa, Homo sapiens
EIVMTQSPATLSVSPGESTTLSCRASESVDSNLAWYQQKPGQAPRLLIYGASTRATGIPARFSGSGSGTEFTLTISSLQSEDFAVYYCQQYNNWPP

SEQ ID NO: 7726 - protein, 108 aa, Homo sapiens
EIVMTQSPATLSVSPGESTTLSCRASESVDSNLAWYQQKPGQAPRLLIYGASTRATGIPARFSGSGSGTEFTLTISSLQSEDFAVYYCQQYNNWPPLTFGGGTKVEIK

SEQ ID NO: 7727 - protein, 96 aa, Homo sapiens
EIVMTQSPATLSVSPGESVTLSCRASQSVSTNLAWYQQKPGQAPRLLIHGAYTRVIGVPARFRGGGSGTDFTLTISGLQSEDFAVYYCQQYHNWPP

SEQ ID NO: 7728 - protein, 109 aa, Homo sapiens
EIVMTQSPATLSVSPGESVTLSCRASQSVSTNLAWYQQKPGQAPRLLIHGAYTRVIGVPARFRGGGSGTDFTLTISGLQSEDFAVYYCQQYHNWPPAYTFGQGTKLDLK

SEQ ID NO: 7729 - protein, 96 aa, Homo sapiens
EIVMTQSPATLSVSPGGRATLSCRASQSVSSNLAWYQQKPGQAPRLLIYGASTRATGIPARFSGSGSGTEFTLTISSMQSEDFAVYYCQQYNNWPP

SEQ ID NO: 7730 - protein, 108 aa, Homo sapiens
EIVMTQSPATLSVSPGGRATLSCRASQSVSSNLAWYQQKPGQAPRLLIYGASTRATGIPARFSGSGSGTEFTLTISSMQSEDFAVYYCQQYNNWPPITFGQGTRLEIK

SEQ ID NO: 7731 - protein, 96 aa, Homo sapiens
EIVMTQSPATLSVSPGGRVTLSCRASQPISTSLAWYQQKPGQSPRLLIFGASTRATGIPDTFSGSGAGTEFTLTISSLQSEDFAVYYCQQYHSWPP

SEQ ID NO: 7732 - protein, 107 aa, Homo sapiens
EIVMTQSPATLSVSPGGRVTLSCRASQPISTSLAWYQQKPGQSPRLLIFGASTRATGIPDTFSGSGAGTEFTLTISSLQSEDFAVYYCQQYHSWPPLTFGGGTKVEI

SEQ ID NO: 7733 - protein, 95 aa, Homo sapiens
EIVMTQSPATLSVSPGKRATLSCRASESVSSNLAWYQHKPGQAPRLLIYGASTRATGIPARFSGSGSGTEFTLTISSLQSDDWAIYYCQQYNNWP

SEQ ID NO: 7734 - protein, 106 aa, Homo sapiens
EIVMTQSPATLSVSPGKRATLSCRASESVSSNLAWYQHKPGQAPRLLIYGASTRATGIPARFSGSGSGTEFTLTISSLQSDDWAIYYCQQYNNWPTFGQGTKVEIK

SEQ ID NO: 7735 - protein, 96 aa, Homo sapiens
EIVMTQSPATLSVSPGQRATLSCRASQSVGSYLAWYQQKPGQAPRLLIYGASTRAANIPPRFSGSGSGTEFTLTISSLQSEDFAVYYCQQYNNWPP

SEQ ID NO: 7736 - protein, 108 aa, Homo sapiens
EIVMTQSPATLSVSPGQRATLSCRASQSVGSYLAWYQQKPGQAPRLLIYGASTRAANIPPRFSGSGSGTEFTLTISSLQSEDFAVYYCQQYNNWPPLTFGGGTKVEIK

SEQ ID NO: 7737 - protein, 96 aa, Homo sapiens
EIVMTQSPATLSVSSGERATLSCRASQSVSSNLAWYQQKPGQAPRLLIYGASTRATGIPARFSGSGSGTEFTLTISSLQSEDFAVYYCQQYNNWPP

SEQ ID NO: 7738 - protein, 108 aa, Homo sapiens
EIVMTQSPATLSVSSGERATLSCRASQSVSSNLAWYQQKPGQAPRLLIYGASTRATGIPARFSGSGSGTEFTLTISSLQSEDFAVYYCQQYNNWPPLTFGGGTKVEIK

SEQ ID NO: 7739 - protein, 96 aa, Homo sapiens
EIVMTQSPATVSVSPGDRVTLFCRASQSVGSSLAWYQQKPGQAPRLLIFDASSRATGIPARFSGSGSGTEFTLTISNLLSEDFAVYYCQQYTDWPP

SEQ ID NO: 7740 - protein, 108 aa, Homo sapiens
EIVMTQSPATVSVSPGDRVTLFCRASQSVGSSLAWYQQKPGQAPRLLIFDASSRATGIPARFSGSGSGTEFTLTISNLLSEDFAVYYCQQYTDWPPWTFGQGSKVEIK

SEQ ID NO: 7741 - protein, 96 aa, Homo sapiens
EIVMTQSPATVSVSPGERATLSCRASQSVNSDLVWYQQKPGQAPRLLIYGASIRATGIPARFSGSGSGTEFTLTISSIQSEDFAVYYCQQYNNWPP

SEQ ID NO: 7742 - protein, 108 aa, Homo sapiens
EIVMTQSPATVSVSPGERATLSCRASQSVNSDLVWYQQKPGQAPRLLIYGASIRATGIPARFSGSGSGTEFTLTISSIQSEDFAVYYCQQYNNWPPLTFGGGTKVEIK

SEQ ID NO: 7743 - protein, 96 aa, Homo sapiens
EIVMTQSPATVSVSPGGRATLSCRASQSVSSSLAWYQQKPGQPPRLLIFDASRRATGIPARFSGSGSGTEFTLTITSLQSEDFAVYYCQHYSNWPP

SEQ ID NO: 7744 - protein, 108 aa, Homo sapiens
EIVMTQSPATVSVSPGGRATLSCRASQSVSSSLAWYQQKPGQPPRLLIFDASRRATGIPARFSGSGSGTEFTLTITSLQSEDFAVYYCQHYSNWPPWTFGQGTKVEIK

SEQ ID NO: 7745 - protein, 101 aa, Homo sapiens
EIVMTQSPDSLAVSPGERATIKCKSSQSLLFSSNNKNYLAWYQQRPGQPPKLLIYWASTRESGVPERFSGSGSGTDFTLTISSLQAEDVALYYCQQYYDIP

SEQ ID NO: 7746 - protein, 112 aa, Homo sapiens
EIVMTQSPDSLAVSPGERATIKCKSSQSLLFSSNNKNYLAWYQQRPGQPPKLLIYWASTRESGVPERFSGSGSGTDFTLTISSLQAEDVALYYCQQYYDIPLTFGGGTKVEF

SEQ ID NO: 7747 - protein, 96 aa, Homo sapiens
EIVMTQSPDTLSLSPGERATLSCRASQSAGSNLAWFQQKPGQAPRLLIYGASTRAPGVPARFSGSGSGTEFTLTINSMQPEDFAVYYCQQYNNWPP

SEQ ID NO: 7748 - protein, 108 aa, Homo sapiens
EIVMTQSPDTLSLSPGERATLSCRASQSAGSNLAWFQQKPGQAPRLLIYGASTRAPGVPARFSGSGSGTEFTLTINSMQPEDFAVYYCQQYNNWPPITFGQGTRLEIK

SEQ ID NO: 7749 - protein, 96 aa, Homo sapiens
EIVMTQSPDTLSVSQGERATLSCRASQSVRSDLAWYQQKAGQAPRLLIYGASTRATGIPARFSGSGSGTEFTLTISSLQSEDFAVYYCQQYNNWPP

SEQ ID NO: 7750 - protein, 108 aa, Homo sapiens
EIVMTQSPDTLSVSQGERATLSCRASQSVRSDLAWYQQKAGQAPRLLIYGASTRATGIPARFSGSGSGTEFTLTISSLQSEDFAVYYCQQYNNWPPLTFGGGTKVEIK

SEQ ID NO: 7751 - protein, 91 aa, Homo sapiens
EIVMTQSPGTLSVFPGEKATLSCRASQSISNNLAWYQQKPGQAPRLLIYGASTRATAIPARFSGSGSGTEFTLTISSVQSEDFAVYYCQHY

SEQ ID NO: 7752 - protein, 104 aa, Homo sapiens
EIVMTQSPGTLSVFPGEKATLSCRASQSISNNLAWYQQKPGQAPRLLIYGASTRATAIPARFSGSGSGTEFTLTISSVQSEDFAVYYCQHYRDTFGQGTRLDIK

SEQ ID NO: 7753 - protein, 100 aa, Homo sapiens
EIVMTQSPLSLPVIPGEPASISCRSSQSLLHTNGYNYLAWYLQKPGQSPQLLIYLASNRASGVPDRFSGSGSGTDFTLKISRFEADDVGVYYCMQALKIP

SEQ ID NO: 7754 - protein, 112 aa, Homo sapiens
EIVMTQSPLSLPVIPGEPASISCRSSQSLLHTNGYNYLAWYLQKPGQSPQLLIYLASNRASGVPDRFSGSGSGTDFTLKISRFEADDVGVYYCMQALKIPRTFGRGTKVEIK

SEQ ID NO: 7755 - protein, 99 aa, Homo sapiens
EIVMTQSPLSLPVTPGQPASISCRSSQSLLHTDGKTYLSWYLQKPGQSPQLLIYELSSRFSGVPDRFSGSGSGTDFTLKISRVEAEDVGTYYCMQGLHL

SEQ ID NO: 7756 - protein, 111 aa, Homo sapiens
EIVMTQSPLSLPVTPGQPASISCRSSQSLLHTDGKTYLSWYLQKPGQSPQLLIYELSSRFSGVPDRFSGSGSGTDFTLKISRVEAEDVGTYYCMQGLHLYSFGQGTKLEIK

SEQ ID NO: 7757 - protein, 100 aa, Homo sapiens
EIVMTQSPLSLPVTVGEPASISCRSSQSLLHSNGYNYLNWYLQKPGQSPQLLIYFGSNGASGVPDRFSASGSGTDFTLKISRVEAEDVGVYYCMQTLQTP

SEQ ID NO: 7758 - protein, 112 aa, Homo sapiens
EIVMTQSPLSLPVTVGEPASISCRSSQSLLHSNGYNYLNWYLQKPGQSPQLLIYFGSNGASGVPDRFSASGSGTDFTLKISRVEAEDVGVYYCMQTLQTPFTFGPGTKVDIK

SEQ ID NO: 7759 - protein, 100 aa, Homo sapiens
EIVMTQSPLSLPVTVGEPASISCRSSQSLLHSNGYNYLNWYVQKPGQSPQLLIYFGSNGAPGVPDRFSGSGSGTDFTLRITRVEAEDVGVYYCMQTLQTP

SEQ ID NO: 7760 - protein, 112 aa, Homo sapiens
EIVMTQSPLSLPVTVGEPASISCRSSQSLLHSNGYNYLNWYVQKPGQSPQLLIYFGSNGAPGVPDRFSGSGSGTDFTLRITRVEAEDVGVYYCMQTLQTPFTFGPGTKVDIK

SEQ ID NO: 7761 - protein, 97 aa, Homo sapiens
EIVMTQSPLSLPVTVGESASISCRSSQSLLHSNGYNYLNWYLQKPGQSPQLLIYFGSNGAPGVPARFSGSGSGTDFTLKITRVEAEDVGVYYCMQGT

SEQ ID NO: 7762 - protein, 112 aa, Homo sapiens
EIVMTQSPLSLPVTVGESASISCRSSQSLLHSNGYNYLNWYLQKPGQSPQLLIYFGSNGAPGVPARFSGSGSGTDFTLKITRVEAEDVGVYYCMQGTHWPLTFGGGTKVEIK

SEQ ID NO: 7763 - protein, 100 aa, Homo sapiens
EIVMTQSPLSLTVTPGEPASISCRSSQSLLYENGINYLDWYLQRPGQSPHLLIYLGSNRASGVPDRFSGSGSGTDFTLKISRVEAEDVGVYYCMQALQSP

SEQ ID NO: 7764 - protein, 112 aa, Homo sapiens
EIVMTQSPLSLTVTPGEPASISCRSSQSLLYENGINYLDWYLQRPGQSPHLLIYLGSNRASGVPDRFSGSGSGTDFTLKISRVEAEDVGVYYCMQALQSPLTFGGGTKVEIK

SEQ ID NO: 7765 - protein, 96 aa, Homo sapiens
EIVMTQSPPTLSVSPGERATLSCRASHSISSNLAWYQQKPGQAPRLLIYGASTRATGVPARFSGSGSGTDFTLTISSLQSEDFAVYYCQQHNNWPP

SEQ ID NO: 7766 - protein, 108 aa, Homo sapiens
EIVMTQSPPTLSVSPGERATLSCRASHSISSNLAWYQQKPGQAPRLLIYGASTRATGVPARFSGSGSGTDFTLTISSLQSEDFAVYYCQQHNNWPPITFGQGTRLEIK

SEQ ID NO: 7767 - protein, 96 aa, Homo sapiens
EIVMTQSPPTLSVSPGERATLSCRASQSVSGNLAWYQQKPGQAPRLLIYGASTRASGIPARFSGSGSGTEFTLTISTLQTEDFAVYYCQQYNNWPP

SEQ ID NO: 7768 - protein, 108 aa, Homo sapiens
EIVMTQSPPTLSVSPGERATLSCRASQSVSGNLAWYQQKPGQAPRLLIYGASTRASGIPARFSGSGSGTEFTLTISTLQTEDFAVYYCQQYNNWPPWTFGQGTKVEIK

SEQ ID NO: 7769 - protein, 96 aa, Homo sapiens
EIVMTQSPPTLSVSPGERATLSCRASQSVSSNLAWYQQKPGQAPRLLIYGASTRATGIPARFSGSGSGTEFTLTISSLQSEDFAVYYCQQYNNWPP

SEQ ID NO: 7770 - protein, 108 aa, Homo sapiens
EIVMTQSPPTLSVSPGERATLSCRASQSVSSNLAWYQQKPGQAPRLLIYGASTRATGIPARFSGSGSGTEFTLTISSLQSEDFAVYYCQQYNNWPPLTFGGGTKVEIK

SEQ ID NO: 7771 - protein, 96 aa, Homo sapiens
EIVMTQSPTTLSVSPGERATFSCRASQSVSSNLAWYQQQPGQAPRLLIYGASTRATGVPARFSASGSGTEFTLTISSLQSEDFAVYFCQQYHNWPP

SEQ ID NO: 7772 - protein, 108 aa, Homo sapiens
EIVMTQSPTTLSVSPGERATFSCRASQSVSSNLAWYQQQPGQAPRLLIYGASTRATGVPARFSASGSGTEFTLTISSLQSEDFAVYFCQQYHNWPPITFGQGTRLEIK

SEQ ID NO: 7773 - protein, 96 aa, Homo sapiens
EIVMTQSPTTLSVSPGERATLACRASQSVSTNLAWYQQKPGQAPRLLIYGASTRATGIPARFSGSGSGTEFTLTITSLQSEDFAIYYCQQYSNWPP

SEQ ID NO: 7774 - protein, 108 aa, Homo sapiens
EIVMTQSPTTLSVSPGERATLACRASQSVSTNLAWYQQKPGQAPRLLIYGASTRATGIPARFSGSGSGTEFTLTITSLQSEDFAIYYCQQYSNWPPITFGQGTRLDIK

SEQ ID NO: 7775 - protein, 96 aa, Homo sapiens
EIVMTQSPVSLSVSPGDRVTLSCRASQSISNSLAWYQQKPGQVPRLLIYGSSTRAAGIPARFSGSGSGTEFTLTISSLQSEDVAVYYCQQYNNWPP

SEQ ID NO: 7776 - protein, 108 aa, Homo sapiens
EIVMTQSPVSLSVSPGDRVTLSCRASQSISNSLAWYQQKPGQVPRLLIYGSSTRAAGIPARFSGSGSGTEFTLTISSLQSEDVAVYYCQQYNNWPPLTFGGGTKVEIK

SEQ ID NO: 7777 - protein, 96 aa, Homo sapiens
EIVMTQSPVTLSVAPGERATLSCRASQSLNMDLAWYQQKPGQAPRLLIYGASTRATGIPARFSGSGSGTEFTLTISSLQSEDFAVYYCQQYHNWPP

SEQ ID NO: 7778 - protein, 107 aa, Homo sapiens
EIVMTQSPVTLSVAPGERATLSCRASQSLNMDLAWYQQKPGQAPRLLIYGASTRATGIPARFSGSGSGTEFTLTISSLQSEDFAVYYCQQYHNWPPLTFGGGTKVEI

SEQ ID NO: 7779 - protein, 96 aa, Homo sapiens
EIVMTQSPVTLSVSPGERATLSCRASQSVSSNLAWYQQKPGQAPRLLIYGASTRATGIPARFSGSGSGTEFTLTISSMQSEDFAVYYCQQYNNWPP

SEQ ID NO: 7780 - protein, 108 aa, Homo sapiens
EIVMTQSPVTLSVSPGERATLSCRASQSVSSNLAWYQQKPGQAPRLLIYGASTRATGIPARFSGSGSGTEFTLTISSMQSEDFAVYYCQQYNNWPPWTFGQGTKVEIK

SEQ ID NO: 7781 - protein, 96 aa, Homo sapiens
EIVMTQSPVTLSVSPGERATLSCRSSQSVGTNLAWYQQKPGQVPRLLVYGASTRATGIPARFSGSGSGTQFTLTISGLQSEDFAVYYCQQYHNWPP

SEQ ID NO: 7782 - protein, 108 aa, Homo sapiens
EIVMTQSPVTLSVSPGERATLSCRSSQSVGTNLAWYQQKPGQVPRLLVYGASTRATGIPARFSGSGSGTQFTLTISGLQSEDFAVYYCQQYHNWPPLTFGGGTKVEIK

SEQ ID NO: 7783 - protein, 96 aa, Homo sapiens
EIVMTQSPVTLSVSPGERVTLSCRTSESVSSNLAWYQQKPGQAPRLLIYGASTRATGIPARFSGSGSGTEFTLTISSLQSEDFAVYYCQQYNNWPP

SEQ ID NO: 7784 - protein, 108 aa, Homo sapiens
EIVMTQSPVTLSVSPGERVTLSCRTSESVSSNLAWYQQKPGQAPRLLIYGASTRATGIPARFSGSGSGTEFTLTISSLQSEDFAVYYCQQYNNWPPLTFGGGTKVEIK

SEQ ID NO: 7785 - protein, 96 aa, Homo sapiens
EIVMTQSPVTLSVSPGETATLSCRASQSVARNLAWYQQKPGQAPRLLIYGASTRATGIPARFSGSGSGTEFTLTISSLQSEDFAVYYCQQYNNWPP

SEQ ID NO: 7786 - protein, 108 aa, Homo sapiens
EIVMTQSPVTLSVSPGETATLSCRASQSVARNLAWYQQKPGQAPRLLIYGASTRATGIPARFSGSGSGTEFTLTISSLQSEDFAVYYCQQYNNWPPLTFGGGTKVEIK

SEQ ID NO: 7787 - protein, 96 aa, Homo sapiens
EIVMTQSQATLSVSPGERATLSCRASQSVGSNLAWYQQKPGQAPRLLIYGASTRATNIPPRFSGSGSGTEFTLTISSLQSEDFAVYYCQQYHNWPP

SEQ ID NO: 7788 - protein, 108 aa, Homo sapiens
EIVMTQSQATLSVSPGERATLSCRASQSVGSNLAWYQQKPGQAPRLLIYGASTRATNIPPRFSGSGSGTEFTLTISSLQSEDFAVYYCQQYHNWPPITFGQGTRLEIK

SEQ ID NO: 7789 - protein, 100 aa, Homo sapiens
EIVMTQTPLSLAVTSGQPASISCKSSQSLLHSDGKTYLYWYLQKPGQPPQLLIYEVSNRFSGVPDRFSGSGSGTDFTLKISRVEAEDVGLYYCMQSVQIP

SEQ ID NO: 7790 - protein, 112 aa, Homo sapiens
EIVMTQTPLSLAVTSGQPASISCKSSQSLLHSDGKTYLYWYLQKPGQPPQLLIYEVSNRFSGVPDRFSGSGSGTDFTLKISRVEAEDVGLYYCMQSVQIPCTFGQGTKLEIK

SEQ ID NO: 7791 - protein, 100 aa, Homo sapiens
EIVMTQTPLSLAVTSGQPASISCKSSQSLLHSDGKTYLYWYLQKPGQPPQLLIYEVSNRFSGVPDRFSGSGSGTDFTLKISRVEAEDVGVYYCMQSVQLP

SEQ ID NO: 7792 - protein, 112 aa, Homo sapiens
EIVMTQTPLSLAVTSGQPASISCKSSQSLLHSDGKTYLYWYLQKPGQPPQLLIYEVSNRFSGVPDRFSGSGSGTDFTLKISRVEAEDVGVYYCMQSVQLPCTFGQGTKLEIK

SEQ ID NO: 7793 - protein, 101 aa, Homo sapiens
EIVMTQTPLSLSVTPGQPASISCKSSQSLLHSDGNTYLYWYLQKPGQPPQLLIYEVSNRFSGVPDRFSGSGSGTDFTLKISRVEAEDVGVYYCMQSIQLPP

SEQ ID NO: 7794 - protein, 112 aa, Homo sapiens
EIVMTQTPLSLSVTPGQPASISCKSSQSLLHSDGNTYLYWYLQKPGQPPQLLIYEVSNRFSGVPDRFSGSGSGTDFTLKISRVEAEDVGVYYCMQSIQLPPAFGGGTKVEIK

SEQ ID NO: 7795 - protein, 100 aa, Homo sapiens
EIVMTQTPLSSPVTLGQPASISCTSSESLVHSNGNTYLSWIHQRPGQPPRPLIYKVSDRFSGVPERFSGSGAGTDFTLKISGVEPEDVGIYYCMQATRFP

SEQ ID NO: 7796 - protein, 111 aa, Homo sapiens
EIVMTQTPLSSPVTLGQPASISCTSSESLVHSNGNTYLSWIHQRPGQPPRPLIYKVSDRFSGVPERFSGSGAGTDFTLKISGVEPEDVGIYYCMQATRFPWTFGQGTEVEI

SEQ ID NO: 7797 - protein, 101 aa, Homo sapiens
EIVMTQTPNSLSVTPGEPASISCKSSQSLLHSDGKTYLYWYLQRAGQSPQLLFYEVSSRFSGVPDRFSASGSGTDFTLKISRVEAEDLGVYYCMQGMHPPP

SEQ ID NO: 7798 - protein, 112 aa, Homo sapiens
EIVMTQTPNSLSVTPGEPASISCKSSQSLLHSDGKTYLYWYLQRAGQSPQLLFYEVSSRFSGVPDRFSASGSGTDFTLKISRVEAEDLGVYYCMQGMHPPPYTFGQGTKLDI

SEQ ID NO: 7799 - protein, 101 aa, Homo sapiens
EIVMTQTPSSLSVTPGESASISCKSSQSLLHSDGKTYLYWYLQKAGQSPQLLFYEVSSRFSGVPDRFSASGSGTDFTLKISRVEAEDLGVYYCMQGMHPPP

SEQ ID NO: 7800 - protein, 112 aa, Homo sapiens
EIVMTQTPSSLSVTPGESASISCKSSQSLLHSDGKTYLYWYLQKAGQSPQLLFYEVSSRFSGVPDRFSASGSGTDFTLKISRVEAEDLGVYYCMQGMHPPPYTFGQGTKLDI

SEQ ID NO: 7801 - protein, 93 aa, Homo sapiens
EIVVTQSPATLSLSPGERATLSCRTSQSFSSLAWYQQKPGQAPRLLIYDASNRATGIPARFSASGSGTDFTLTISSLEPEDFAIYYCLQRSNW

SEQ ID NO: 7802 - protein, 106 aa, Homo sapiens
EIVVTQSPATLSLSPGERATLSCRTSQSFSSLAWYQQKPGQAPRLLIYDASNRATGIPARFSASGSGTDFTLTISSLEPEDFAIYYCLQRSNWQYTFGQGTKLEIK

SEQ ID NO: 7803 - protein, 16 aa, Homo sapiens
EIYHSGSTKFNPSLKS

SEQ ID NO: 7804 - protein, 13 aa, Homo sapiens
EKGSSSNWSGKDF

SEQ ID NO: 7805 - protein, 11 aa, Homo sapiens
EKSPSEDVFDM

SEQ ID NO: 7806 - protein, 5 aa, Homo sapiens
ELAIH

SEQ ID NO: 7807 - protein, 19 aa, Homo sapiens
ELANFGVIIVDDYYFGMDV

SEQ ID NO: 7808 - protein, 19 aa, Homo sapiens
ELAVRLLRYFDWINSPFDY

SEQ ID NO: 7809 - protein, 5 aa, Homo sapiens
ELCIH

SEQ ID NO: 7810 - protein, 11 aa, Homo sapiens
ELGYSSSLFDF

SEQ ID NO: 7811 - protein, 5 aa, Homo sapiens
ELILH

SEQ ID NO: 7812 - protein, 16 aa, Homo sapiens
ELIRGVIFAYYYGMDV

SEQ ID NO: 7813 - protein, 16 aa, Homo sapiens
ELLWFGELGDLGAFDI

SEQ ID NO: 7814 - protein, 20 aa, Homo sapiens
ELNSALLRYFDWLRADGLDV

SEQ ID NO: 7815 - protein, 12 aa, Homo sapiens
ELQDTATYYFDY

SEQ ID NO: 7816 - protein, 98 aa, Homo sapiens
ELQLVESGGDLVQPGGSLRLSCAASGFTFSRYWMSWVRQAPGKGLEWVASIKEDGSEKHYVDSVKGRFIISRDNVENSVYLQMDSLRVGDMAFYYCVR

SEQ ID NO: 7817 - protein, 123 aa, Homo sapiens
ELQLVESGGDLVQPGGSLRLSCAASGFTFSRYWMSWVRQAPGKGLEWVASIKEDGSEKHYVDSVKGRFIISRDNVENSVYLQMDSLRVGDMAFYYCVRQHLWESSGYRCFDNWGQGTLVTVSS

SEQ ID NO: 7818 - protein, 5 aa, Homo sapiens
ELSIH

SEQ ID NO: 7819 - protein, 5 aa, Homo sapiens
ELSIQ

SEQ ID NO: 7820 - protein, 5 aa, Homo sapiens
ELSMH

SEQ ID NO: 7821 - protein, 7 aa, Homo sapiens
ELSNPFS

SEQ ID NO: 7822 - protein, 7 aa, Homo sapiens
ELSNRFS

SEQ ID NO: 7823 - protein, 14 aa, Homo sapiens
ELSRNIAIGGTLGQ

SEQ ID NO: 7824 - protein, 7 aa, Homo sapiens
ELSSRFS

SEQ ID NO: 7825 - protein, 7 aa, Homo sapiens
ELSSRVS

SEQ ID NO: 7826 - protein, 94 aa, Homo sapiens
ELVLTQSPAALSLSPGERATLSCRASQAVSSYLAWYQQKPGQAPRLLMYDVSIRATGIPDRFSGSGSGTDFTLTISSLEPEDFAVYYCQQRNSW

SEQ ID NO: 7827 - protein, 106 aa, Homo sapiens
ELVLTQSPAALSLSPGERATLSCRASQAVSSYLAWYQQKPGQAPRLLMYDVSIRATGIPDRFSGSGSGTDFTLTISSLEPEDFAVYYCQQRNSWRYTFGPGTKLEI

SEQ ID NO: 7828 - protein, 96 aa, Homo sapiens
ELVLTQSPGTLSLSPGQRATLSCRASQSIWKNYLSWYQQKPGQAPSLLIYGASTRATGIPDRFSGSGSGTDFTLTITRLEPEDIAVYYCQQHGNSP

SEQ ID NO: 7829 - protein, 108 aa, Homo sapiens
ELVLTQSPGTLSLSPGQRATLSCRASQSIWKNYLSWYQQKPGQAPSLLIYGASTRATGIPDRFSGSGSGTDFTLTITRLEPEDIAVYYCQQHGNSPRTFGQGTKVEIK

SEQ ID NO: 7830 - protein, 95 aa, Homo sapiens
ELVMTQSPATLSVSPGERVTLSCRASQRISNNLAWYQQRPGQAPRLLISGASTRATGIPARFSGSGSGTDFTLVISSLQSEDSAVYYCQQYNNWP

SEQ ID NO: 7831 - protein, 106 aa, Homo sapiens
ELVMTQSPATLSVSPGERVTLSCRASQRISNNLAWYQQRPGQAPRLLISGASTRATGIPARFSGSGSGTDFTLVISSLQSEDSAVYYCQQYNNWPSFGQGTKLEIK

SEQ ID NO: 7832 - protein, 17 aa, Homo sapiens
ELWVPPAIRGNIHSFDY

SEQ ID NO: 7833 - protein, 98 aa, Homo sapiens
EMQLLESGGGLVLPGGSLRLSCAASGFTFGSYGMSWVRQAPGKGLEWVCSIRDSGISRYYTDSVKGRFTISRDNSKNTLHLQMSSLRADDTAVYYCAK

SEQ ID NO: 7834 - protein, 124 aa, Homo sapiens
EMQLLESGGGLVLPGGSLRLSCAASGFTFGSYGMSWVRQAPGKGLEWVCSIRDSGISRYYTDSVKGRFTISRDNSKNTLHLQMSSLRADDTAVYYCAKALSNKWPGREAYLDLWGRGTLVSVSS

SEQ ID NO: 7835 - protein, 98 aa, Homo sapiens
EMQLLESGGGLVQPGGSLRLSCAASGFTFKNYAMTWVRQAPGKGLEWVSSVSGSGDSTYYADSVKGRFTISRGNSKNTLYLQMNSLRAEDTAIYFCAK

SEQ ID NO: 7836 - protein, 120 aa, Homo sapiens
EMQLLESGGGLVQPGGSLRLSCAASGFTFKNYAMTWVRQAPGKGLEWVSSVSGSGDSTYYADSVKGRFTISRGNSKNTLYLQMNSLRAEDTAIYFCAKSRYYYYYYMDVWGKGTTVTVSS

SEQ ID NO: 7837 - protein, 98 aa, Homo sapiens
EMQLVESGGGLVQPGESLRLSCRGSESFFSVDWMSWVRQTPGKGLEWVGNIDKEGSERHYVDSVKGRFTISRDNAENSVFLQINSLRVGDTGVYYCAR

SEQ ID NO: 7838 - protein, 120 aa, Homo sapiens
EMQLVESGGGLVQPGESLRLSCRGSESFFSVDWMSWVRQTPGKGLEWVGNIDKEGSERHYVDSVKGRFTISRDNAENSVFLQINSLRVGDTGVYYCARAWDGSNGAFDIWGQGTMVTVSS

SEQ ID NO: 7839 - protein, 98 aa, Homo sapiens
EMQLVQSGGGLVQPGGSLRLSCAASGFALNTYWMSWVRQAPGKGLEWVANIRKDGSKMYYLDSVEGRFTISRDDAKNSLYLQLNNLRAEDTAIYYCAT

SEQ ID NO: 7840 - protein, 126 aa, Homo sapiens
EMQLVQSGGGLVQPGGSLRLSCAASGFALNTYWMSWVRQAPGKGLEWVANIRKDGSKMYYLDSVEGRFTISRDDAKNSLYLQLNNLRAEDTAIYYCATEDWGHSDSDGWSNRGDCWGQGAQVTVSS

SEQ ID NO: 7841 - protein, 98 aa, Homo sapiens
EMQLVQSGGGLVQPGGSLRLSCAASGFKFSAFYMSWVRQAPGKGLEWVANINEDGSETHCVDSVKGRATFSRDNTKNSLYLQMDRLRVDDTAVYYCAR

SEQ ID NO: 7842 - protein, 120 aa, Homo sapiens
EMQLVQSGGGLVQPGGSLRLSCAASGFKFSAFYMSWVRQAPGKGLEWVANINEDGSETHCVDSVKGRATFSRDNTKNSLYLQMDRLRVDDTAVYYCARAYDDTNGAFDIWGQGTMVTVSS

SEQ ID NO: 7843 - protein, 97 aa, Homo sapiens
EMRLVESGGGFVQPGESLRLSCAASGFTFSKYWMTWVRRAPGKGLEWVANIREDGSEKYYLDSVKGRFAVSRDNAENSLYLQINGLRADDTAVYYCA

SEQ ID NO: 7844 - protein, 115 aa, Homo sapiens
EMRLVESGGGFVQPGESLRLSCAASGFTFSKYWMTWVRRAPGKGLEWVANIREDGSEKYYLDSVKGRFAVSRDNAENSLYLQINGLRADDTAVYYCASLYPDDYWGQGTLVTVSS

SEQ ID NO: 7845 - protein, 14 aa, Homo sapiens
EMRRDIATAGYFDY

SEQ ID NO: 7846 - protein, 16 aa, Homo sapiens
EMSHDGKPNYSPSLKS

SEQ ID NO: 7847 - protein, 95 aa, Homo sapiens
EMVLTQSPGTLSLSPGERATLSCRASQSVSSSSLAWYQQKPGQAPRLLIYDASSRATGIPDRFSGSGSGTDFTLTISRLEPEDFAVYYCQHYGSS

SEQ ID NO: 7848 - protein, 108 aa, Homo sapiens
EMVLTQSPGTLSLSPGERATLSCRASQSVSSSSLAWYQQKPGQAPRLLIYDASSRATGIPDRFSGSGSGTDFTLTISRLEPEDFAVYYCQHYGSSFLTFGGGTRVEIK

SEQ ID NO: 7849 - protein, 96 aa, Homo sapiens
EMVLTQSPGTLSLSPGERATLSCRASQSVSSTSLAWYQQRPGQAPRLLIYDASNRATGIPDRFSGSGSGTDFTLTISRLEPEDFAVYFCQHYDSSS

SEQ ID NO: 7850 - protein, 108 aa, Homo sapiens
EMVLTQSPGTLSLSPGERATLSCRASQSVSSTSLAWYQQRPGQAPRLLIYDASNRATGIPDRFSGSGSGTDFTLTISRLEPEDFAVYFCQHYDSSSLTFGGGTKVEIK

SEQ ID NO: 7851 - protein, 95 aa, Homo sapiens
EMVMTQSPATLSVSPGDTATLSCRASQSVSSKLAWYQHKPGQAPRLLIYGASTRATGIPARFSGSGSGTEFTLTITSLQSEDFAVYYCHQYNNWP

SEQ ID NO: 7852 - protein, 107 aa, Homo sapiens
EMVMTQSPATLSVSPGDTATLSCRASQSVSSKLAWYQHKPGQAPRLLIYGASTRATGIPARFSGSGSGTEFTLTITSLQSEDFAVYYCHQYNNWPRTFGQGTKVEIK

SEQ ID NO: 7853 - protein, 96 aa, Homo sapiens
EMVMTQSPATLSVSPGERATLSCRASQSVSSNLAWYQQKPGQAPRLLIYGASTRATGIPVRFSGSGSGTEFTLTISSMQSEDFAVYYCQQYDTWPP

SEQ ID NO: 7854 - protein, 108 aa, Homo sapiens
EMVMTQSPATLSVSPGERATLSCRASQSVSSNLAWYQQKPGQAPRLLIYGASTRATGIPVRFSGSGSGTEFTLTISSMQSEDFAVYYCQQYDTWPPWTFGQGTKVEVK

SEQ ID NO: 7855 - protein, 7 aa, Homo sapiens
ENDQRPS

SEQ ID NO: 7856 - protein, 6 aa, Homo sapiens
ENDWWD

SEQ ID NO: 7857 - protein, 14 aa, Homo sapiens
ENGFMSTWFIGFDN

SEQ ID NO: 7858 - protein, 21 aa, Homo sapiens
ENLQVGEDTAMVTSYYYYMDV

SEQ ID NO: 7859 - protein, 7 aa, Homo sapiens
ENNKRPS

SEQ ID NO: 7860 - protein, 7 aa, Homo sapiens
ENNRRPS

SEQ ID NO: 7861 - protein, 14 aa, Homo sapiens
ENRYNFGSGSFWAV

SEQ ID NO: 7862 - protein, 18 aa, Homo sapiens
ENSLVIDSGGFYLGPFEE

SEQ ID NO: 7863 - protein, 7 aa, Homo sapiens
ENTKRPS

SEQ ID NO: 7864 - protein, 7 aa, Homo sapiens
ENTKRPS

SEQ ID NO: 7865 - protein, 96 aa, Homo sapiens
ENVLTQSPGTLSLSPGDRATLSCRASQSVTSNYLAWYQQKPGLAPRLLIYDASSRATGIPDRFSGSGSGTDFTLTVSRLEPEDFAVYYCQQYGSSP

SEQ ID NO: 7866 - protein, 108 aa, Homo sapiens
ENVLTQSPGTLSLSPGDRATLSCRASQSVTSNYLAWYQQKPGLAPRLLIYDASSRATGIPDRFSGSGSGTDFTLTVSRLEPEDFAVYYCQQYGSSPTTFGGGTKVEIK

SEQ ID NO: 7867 - protein, 96 aa, Homo sapiens
ENVLTQSPGTLSLSPGERATLSCRASQSVSSSHLAWYQQKPGQAPRLLIYGASSRATGIPDRFSGSGSGTDFTLTISRLEPEDFAVYYCQQYGSSP

SEQ ID NO: 7868 - protein, 108 aa, Homo sapiens
ENVLTQSPGTLSLSPGERATLSCRASQSVSSSHLAWYQQKPGQAPRLLIYGASSRATGIPDRFSGSGSGTDFTLTISRLEPEDFAVYYCQQYGSSPVTFGGGTKVEIK

SEQ ID NO: 7869 - protein, 96 aa, Homo sapiens
ENVLTQSPGTLSLSPGERATLSCRASQSVSSSYLAWYQQKPGQAPRLLIYDVSSRATGIPDRFSGSGSGTDFTLTISRLEPEDFALYYCQQYGSSP

SEQ ID NO: 7870 - protein, 108 aa, Homo sapiens
ENVLTQSPGTLSLSPGERATLSCRASQSVSSSYLAWYQQKPGQAPRLLIYDVSSRATGIPDRFSGSGSGTDFTLTISRLEPEDFALYYCQQYGSSPRTFGQGTKVEIK

SEQ ID NO: 7871 - protein, 5 aa, Homo sapiens
ENVMH

SEQ ID NO: 7872 - protein, 100 aa, Homo sapiens
ENVMTQSPLSLPVTPGEPASISCRSSQSLLHSNGYNYLDWYLQKPGQSPQLLIYLGSIRASGVPDRFSGSGSGTDFTLKISRVEAEDVGVYYCMQGLQTP

SEQ ID NO: 7873 - protein, 112 aa, Homo sapiens
ENVMTQSPLSLPVTPGEPASISCRSSQSLLHSNGYNYLDWYLQKPGQSPQLLIYLGSIRASGVPDRFSGSGSGTDFTLKISRVEAEDVGVYYCMQGLQTPNTFGQGTKLEIK

SEQ ID NO: 7874 - protein, 17 aa, Homo sapiens
ENYEVNGSGSYYPYFDY

SEQ ID NO: 7875 - protein, 19 aa, Homo sapiens
EPATFGVVIVDDYYFGMDV

SEQ ID NO: 7876 - protein, 19 aa, Homo sapiens
EPATFGVVIVDDYYFGWDV

SEQ ID NO: 7877 - protein, 11 aa, Homo sapiens
EPAYANNWFLH

SEQ ID NO: 7878 - protein, 10 aa, Homo sapiens
EPEGLGHYDH

SEQ ID NO: 7879 - protein, 14 aa, Homo sapiens
EPHPFSSGDYYFDY

SEQ ID NO: 7880 - protein, 12 aa, Homo sapiens
EPMIRGIIRNDY

SEQ ID NO: 7881 - protein, 20 aa, Homo sapiens
EPNPPYSSSWYGGYYYYMDV

SEQ ID NO: 7882 - protein, 16 aa, Homo sapiens
EPQDSFESTAYRGLGY

SEQ ID NO: 7883 - protein, 13 aa, Homo sapiens
EPSGYSRANAFDV

SEQ ID NO: 7884 - protein, 9 aa, Homo sapiens
EPSSVAADY

SEQ ID NO: 7885 - protein, 11 aa, Homo sapiens
EQGGSGRALDY

SEQ ID NO: 7886 - protein, 97 aa, Homo sapiens
EQQLVESGGALVQPGGSLRLSCLVSGINFNTFWMNWVRQAPGKGLEWVANIKADGTEKFYADSVKGRFTISRDNSRRSLYLRLDNLRAEDSATYYCA

SEQ ID NO: 7887 - protein, 115 aa, Homo sapiens
EQQLVESGGALVQPGGSLRLSCLVSGINFNTFWMNWVRQAPGKGLEWVANIKADGTEKFYADSVKGRFTISRDNSRRSLYLRLDNLRAEDSATYYCAPGHYNGQWGQGTLVTVSS

SEQ ID NO: 7888 - protein, 8 aa, Homo sapiens
EQQLVIDY

SEQ ID NO: 7889 - protein, 21 aa, Homo sapiens
EQRIRLGEFSLYDPSYYYMDV

SEQ ID NO: 7890 - protein, 20 aa, Homo sapiens
EQYGSYYYGSGSYYNGCFDP

SEQ ID NO: 7891 - protein, 14 aa, Homo sapiens
ERAWLLPTGGDFDY

SEQ ID NO: 7892 - protein, 15 aa, Homo sapiens
ERCSGGSCYPGVSDY

SEQ ID NO: 7893 - protein, 12 aa, Homo sapiens
ERDYGDYVYFDY

SEQ ID NO: 7894 - protein, 11 aa, Homo sapiens
ERGDFSNWFDP

SEQ ID NO: 7895 - protein, 14 aa, Homo sapiens
ERGNYYGSGRPLGY

SEQ ID NO: 7896 - protein, 14 aa, Homo sapiens
ERIPFDNSGWESDY

SEQ ID NO: 7897 - protein, 14 aa, Homo sapiens
ERIPFDNSGWESEY

SEQ ID NO: 7898 - protein, 20 aa, Homo sapiens
ERKYQLLSRGLGSLHDAFDI

SEQ ID NO: 7899 - protein, 14 aa, Homo sapiens
ERPGSSWYNDAFDI

SEQ ID NO: 7900 - protein, 18 aa, Homo sapiens
ERRFGEPFALVYGDAFDI

SEQ ID NO: 7901 - protein, 17 aa, Homo sapiens
ERRFGRLTLSRADAFDV

SEQ ID NO: 7902 - protein, 16 aa, Homo sapiens
ERRRFLDGGGYYGMDL

SEQ ID NO: 7903 - protein, 14 aa, Homo sapiens
ERVSLMAGYDYMDM

SEQ ID NO: 7904 - protein, 14 aa, Homo sapiens
ERYDSSGNYYGMDV

SEQ ID NO: 7905 - protein, 20 aa, Homo sapiens
ESATEGFGELSFRGDHAFDL

SEQ ID NO: 7906 - protein, 12 aa, Homo sapiens
ESGERTLYYFDF

SEQ ID NO: 7907 - protein, 12 aa, Homo sapiens
ESGIVGDKVFDY

SEQ ID NO: 7908 - protein, 13 aa, Homo sapiens
ESGSYYGRGYFDV

SEQ ID NO: 7909 - protein, 11 aa, Homo sapiens
ESLYGGYYFDY

SEQ ID NO: 7910 - protein, 11 aa, Homo sapiens
ESPTMVQGWYY

SEQ ID NO: 7911 - protein, 22 aa, Homo sapiens
ESPTYLDILTDYYVPGRDAFDI

SEQ ID NO: 7912 - protein, 17 aa, Homo sapiens
ESSDRIAVAGTPRWFDP

SEQ ID NO: 7913 - protein, 7 aa, Homo sapiens
ESSHLET

SEQ ID NO: 7914 - protein, 17 aa, Homo sapiens
ESSQSVLYSSNEKNYLA

SEQ ID NO: 7915 - protein, 13 aa, Homo sapiens
ESTYYGRLNYMDV

SEQ ID NO: 7916 - protein, 96 aa, Homo sapiens
ESVLTQSPGTLSLSPGERATLSCRASQSVRSSYLAWYQQKPGQAPRLLIYGASSRATGIPDRFSGSGSATDFTLTISRLEPEDFAVYYCQQYGSSP

SEQ ID NO: 7917 - protein, 108 aa, Homo sapiens
ESVLTQSPGTLSLSPGERATLSCRASQSVRSSYLAWYQQKPGQAPRLLIYGASSRATGIPDRFSGSGSATDFTLTISRLEPEDFAVYYCQQYGSSPCTFGQGTKLEIK

SEQ ID NO: 7918 - protein, 7 aa, Homo sapiens
ETDQRPS

SEQ ID NO: 7919 - protein, 20 aa, Homo sapiens
ETGHCSGGSCYDYYYYGMDV

SEQ ID NO: 7920 - protein, 13 aa, Homo sapiens
ETGSAASSYYMDV

SEQ ID NO: 7921 - protein, 12 aa, Homo sapiens
ETGYHFGSPFDL

SEQ ID NO: 7922 - protein, 12 aa, Homo sapiens
ETGYNFGSPFEV

SEQ ID NO: 7923 - protein, 12 aa, Homo sapiens
ETGYSFGSPFDL

SEQ ID NO: 7924 - protein, 10 aa, Homo sapiens
ETILGSTTAY

SEQ ID NO: 7925 - protein, 95 aa, Homo sapiens
ETLMTQFPQTLSASPGERVTLSCRASQPVGGSLAWYLLRPGQVPRLLIHSVSRRATDVPARFSGSGSGTEFTLVISSLQSEDFGVYSCQQYYDRP

SEQ ID NO: 7926 - protein, 107 aa, Homo sapiens
ETLMTQFPQTLSASPGERVTLSCRASQPVGGSLAWYLLRPGQVPRLLIHSVSRRATDVPARFSGSGSGTEFTLVISSLQSEDFGVYSCQQYYDRPWTFGQGTRVDLK

SEQ ID NO: 7927 - protein, 13 aa, Homo sapiens
ETMVQGVMGYFDY

SEQ ID NO: 7928 - protein, 9 aa, Homo sapiens
ETPSSAFDY

SEQ ID NO: 7929 - protein, 7 aa, Homo sapiens
ETSNRAT

SEQ ID NO: 7930 - protein, 95 aa, Homo sapiens
ETTLTQSPAFMSATPGDKVSISCKASQDIDDDMSWFQQKPGEAPIFIIKEASTLVPGIPPRFSGSGYGTDFTLTINNIESEDAAFYFCLQHHNFP

SEQ ID NO: 7931 - protein, 107 aa, Homo sapiens
ETTLTQSPAFMSATPGDKVSISCKASQDIDDDMSWFQQKPGEAPIFIIKEASTLVPGIPPRFSGSGYGTDFTLTINNIESEDAAFYFCLQHHNFPRTFGQGTKLEMK

SEQ ID NO: 7932 - protein, 96 aa, Homo sapiens
ETVLTQSPATLSLSPGERATLSCGASQSVSSSYLAWYQQKPGLAPRLLIYDASIRATGIPDRFSGSGSGTDFTLTISGLEPEDFAVYYCQQYGNSP

SEQ ID NO: 7933 - protein, 108 aa, Homo sapiens
ETVLTQSPATLSLSPGERATLSCGASQSVSSSYLAWYQQKPGLAPRLLIYDASIRATGIPDRFSGSGSGTDFTLTISGLEPEDFAVYYCQQYGNSPFTFGGGTKVEIK

SEQ ID NO: 7934 - protein, 95 aa, Homo sapiens
ETVLTQSPATLSLSPGERATLSCRASQSLNNYLAWYQHKPGQAPRLLIYDASNRATGVPARFSGSGSGTDFTLTISSLEPEDFAVYYCQQRSSWP

SEQ ID NO: 7935 - protein, 108 aa, Homo sapiens
ETVLTQSPATLSLSPGERATLSCRASQSLNNYLAWYQHKPGQAPRLLIYDASNRATGVPARFSGSGSGTDFTLTISSLEPEDFAVYYCQQRSSWPTWTFGQGTRVEIK

SEQ ID NO: 7936 - protein, 96 aa, Homo sapiens
ETVLTQSPGTLSLSPGEGATLSCRASQSVSNTNLAWYQQKPGQAPRLLIYGASSRATGIPDRFSGSGSGTDFTLTISRLEPEDFAVYYCQQYGSSP

SEQ ID NO: 7937 - protein, 108 aa, Homo sapiens
ETVLTQSPGTLSLSPGEGATLSCRASQSVSNTNLAWYQQKPGQAPRLLIYGASSRATGIPDRFSGSGSGTDFTLTISRLEPEDFAVYYCQQYGSSPFTFGPGTKVDIK

SEQ ID NO: 7938 - protein, 95 aa, Homo sapiens
ETVLTQSPGTLSLSPGERATLSCRASQNINNNYLAWYQQRPGQAPRLLIYGASSRATGIPDRFSGSGSGTDFSLTISRLEPEDFAVYYCQHYGTS

SEQ ID NO: 7939 - protein, 109 aa, Homo sapiens
ETVLTQSPGTLSLSPGERATLSCRASQNINNNYLAWYQQRPGQAPRLLIYGASSRATGIPDRFSGSGSGTDFSLTISRLEPEDFAVYYCQHYGTSLLSTFGQGTKLEIK

SEQ ID NO: 7940 - protein, 95 aa, Homo sapiens
ETVLTQSPGTLSLSPGERATLSCRASQSVSSSYLTWYQQKSGQAPRLLIYGASRRAAGIPDRFSGSGSGTDFTLTISRLEPEDFAVYYCQHYGSS

SEQ ID NO: 7941 - protein, 108 aa, Homo sapiens
ETVLTQSPGTLSLSPGERATLSCRASQSVSSSYLTWYQQKSGQAPRLLIYGASRRAAGIPDRFSGSGSGTDFTLTISRLEPEDFAVYYCQHYGSSLWTFGQGTKVEIK

SEQ ID NO: 7942 - protein, 95 aa, Homo sapiens
ETVLTQSPGTLSLSPGERVTLSCRASQSLNSNSLAWYQQKPGQTPRLLIYGASSRATGIPDRFRGSGSGTDFSLTISRLEPEDFAVYYCQQYETS

SEQ ID NO: 7943 - protein, 108 aa, Homo sapiens
ETVLTQSPGTLSLSPGERVTLSCRASQSLNSNSLAWYQQKPGQTPRLLIYGASSRATGIPDRFRGSGSGTDFSLTISRLEPEDFAVYYCQQYETSSLTFGGGTKVEIK

SEQ ID NO: 7944 - protein, 95 aa, Homo sapiens
ETVMTQSPATLSVSPGERATLSCRASQYVSINLAWYQQKPGQAPRLLIYGASTRATGIPVRFSGIGSGTEFTLTISGLQSEDFAIYYCQQYNNWP

SEQ ID NO: 7945 - protein, 107 aa, Homo sapiens
ETVMTQSPATLSVSPGERATLSCRASQYVSINLAWYQQKPGQAPRLLIYGASTRATGIPVRFSGIGSGTEFTLTISGLQSEDFAIYYCQQYNNWPLTFGQGTRLEIK

SEQ ID NO: 7946 - protein, 95 aa, Homo sapiens
ETVMTQSPATLSVSPGERATVSCRASQSVNTNLAWYQQKPGQAPRLLIHGASTRATDVPGRFSGSGSGTEFTLTISSMQSEDFAIYYCQQYNNWP

SEQ ID NO: 7947 - protein, 106 aa, Homo sapiens
ETVMTQSPATLSVSPGERATVSCRASQSVNTNLAWYQQKPGQAPRLLIHGASTRATDVPGRFSGSGSGTEFTLTISSMQSEDFAIYYCQQYNNWPLTFGQGTRLQI

SEQ ID NO: 7948 - protein, 96 aa, Homo sapiens
ETVMTQSPVTLSVSPGERATLSCRASQSVSSNLAWYQQKPGQAPRLLIYGASSRATGIPARFSGSGSGTEFTLTISSLQSEDFAVYYCQQYNTWPP

SEQ ID NO: 7949 - protein, 108 aa, Homo sapiens
ETVMTQSPVTLSVSPGERATLSCRASQSVSSNLAWYQQKPGQAPRLLIYGASSRATGIPARFSGSGSGTEFTLTISSLQSEDFAVYYCQQYNTWPPLTFGGGTKVEIK

SEQ ID NO: 7950 - protein, 100 aa, Homo sapiens
ETVMTQTPLSLSVTPGQTASISCKSSQSLLHSDGKSYLSWYLQKPGQSPQLLIYEVSSRFSGVPDRFSGSGSGTDFTLKISRVEAEDVGFYYCMQGIHLP

SEQ ID NO: 7951 - protein, 112 aa, Homo sapiens
ETVMTQTPLSLSVTPGQTASISCKSSQSLLHSDGKSYLSWYLQKPGQSPQLLIYEVSSRFSGVPDRFSGSGSGTDFTLKISRVEAEDVGFYYCMQGIHLPFTFGPGTKVDIK

SEQ ID NO: 7952 - protein, 11 aa, Homo sapiens
ETWDRSLSAYV

SEQ ID NO: 7953 - protein, 10 aa, Homo sapiens
ETWDSNTLCV

SEQ ID NO: 7954 - protein, 11 aa, Homo sapiens
ETWDTSLSAYV

SEQ ID NO: 7955 - protein, 19 aa, Homo sapiens
ETYFGSGGNYNYYYYGVDV

SEQ ID NO: 7956 - protein, 14 aa, Homo sapiens
ETYSYGRYPRYFDY

SEQ ID NO: 7957 - protein, 13 aa, Homo sapiens
EVAVAGSIVAFDI

SEQ ID NO: 7958 - protein, 18 aa, Homo sapiens
EVCRSLTCLFWSGYSVDL

SEQ ID NO: 7959 - protein, 98 aa, Homo sapiens
EVELLESGGGLVQPGGSLRLSCAASGFFFSNYAMSWVRQAPGKGLEWVSGISGSGDRTYYVDSVKGRFTISRDNSKNTLYLQMNSLRAEDTAIYYCAK

SEQ ID NO: 7960 - protein, 128 aa, Homo sapiens
EVELLESGGGLVQPGGSLRLSCAASGFFFSNYAMSWVRQAPGKGLEWVSGISGSGDRTYYVDSVKGRFTISRDNSKNTLYLQMNSLRAEDTAIYYCAKDHNRANIAVAPWIGYYFDYWGQGTLVTVSS

SEQ ID NO: 7961 - protein, 98 aa, Homo sapiens
EVELLESGGGLVQPGGSLRLSCAVSGFAFANYGMSWVRQAPGKRLEWVSFISGSGLSTYYADSVKGRFTISRDNSKNTLYLRMNSLRAEDTAIYYCAK

SEQ ID NO: 7962 - protein, 122 aa, Homo sapiens
EVELLESGGGLVQPGGSLRLSCAVSGFAFANYGMSWVRQAPGKRLEWVSFISGSGLSTYYADSVKGRFTISRDNSKNTLYLRMNSLRAEDTAIYYCAKGQSTVPSTGWFDPWGQGTLVAVSS

SEQ ID NO: 7963 - protein, 98 aa, Homo sapiens
EVELLESGGGLVQPGGSLRLSCRVSGFTLTTHTMMWVRQAPGKGLEWVSSISGSGLSIYYADSVKGRFTISRDKSKNTLYLQMSSLRVEDTAIYYCAK

SEQ ID NO: 7964 - protein, 122 aa, Homo sapiens
EVELLESGGGLVQPGGSLRLSCRVSGFTLTTHTMMWVRQAPGKGLEWVSSISGSGLSIYYADSVKGRFTISRDKSKNTLYLQMSSLRVEDTAIYYCAKSQSTMPPTGWFDPWGQGTLVIVSS

SEQ ID NO: 7965 - protein, 98 aa, Homo sapiens
EVELLQSGAEVKKPGESLKISCKSSGYDFTKFWIGWVRQMPGKGLEWMGVIWPGDSDTRYSPSFQGQVTISADKFISTAYLQWSSLKASDTAMYYCAR

SEQ ID NO: 7966 - protein, 123 aa, Homo sapiens
EVELLQSGAEVKKPGESLKISCKSSGYDFTKFWIGWVRQMPGKGLEWMGVIWPGDSDTRYSPSFQGQVTISADKFISTAYLQWSSLKASDTAMYYCARFREYADHYVGRFDFWGQGTLVTVSS

SEQ ID NO: 7967 - protein, 98 aa, Homo sapiens
EVELVESGGGLVQPGGSLRLSCAASGFTFGSYWMTWVRQAPGKGLEWVAHINRDGSETYHVDSVKGRFTISRDNAKNSLYLQMNSLRAEDTAVYYCGR

SEQ ID NO: 7968 - protein, 119 aa, Homo sapiens
EVELVESGGGLVQPGGSLRLSCAASGFTFGSYWMTWVRQAPGKGLEWVAHINRDGSETYHVDSVKGRFTISRDNAKNSLYLQMNSLRAEDTAVYYCGRDQRATFGASDWGRGALVTVSS

SEQ ID NO: 7969 - protein, 98 aa, Homo sapiens
EVELVESGGGLVQPGGSLRLSCAASGFTFGTYWMTWVRQAPGKGLEWVAHINRDGSEKYHVDSIKGRFTISRDNAKNSLYLQMNSLRADDTAVYYCGR

SEQ ID NO: 7970 - protein, 119 aa, Homo sapiens
EVELVESGGGLVQPGGSLRLSCAASGFTFGTYWMTWVRQAPGKGLEWVAHINRDGSEKYHVDSIKGRFTISRDNAKNSLYLQMNSLRADDTAVYYCGRDQRATYGASDWGRGTLVTVSS

SEQ ID NO: 7971 - protein, 98 aa, Homo sapiens
EVELVESGGGLVQPGGSLRLSCAASGFTFSRYWMHWVRQAPGKGLAWVSHIRGDGSSTNYADSVKGRFIVSRDNAKNTLYLQMNSLRAEDAAIYYCVR

SEQ ID NO: 7972 - protein, 125 aa, Homo sapiens
EVELVESGGGLVQPGGSLRLSCAASGFTFSRYWMHWVRQAPGKGLAWVSHIRGDGSSTNYADSVKGRFIVSRDNAKNTLYLQMNSLRAEDAAIYYCVRDRDVVVSSAHYDAFDIWGQGTTVAVSS

SEQ ID NO: 7973 - protein, 98 aa, Homo sapiens
EVELVESGGGLVQPGGSLRLSCSASGFTFSTYAMHWVRQAPGKGLEYVSGISSGGGTSYYADSVKGRFTIFRDNSKSTLNLQMDSLRTEDMAVYYCTR

SEQ ID NO: 7974 - protein, 119 aa, Homo sapiens
EVELVESGGGLVQPGGSLRLSCSASGFTFSTYAMHWVRQAPGKGLEYVSGISSGGGTSYYADSVKGRFTIFRDNSKSTLNLQMDSLRTEDMAVYYCTRSQLSYGYWDYWGQGTLVTVSS

SEQ ID NO: 7975 - protein, 97 aa, Homo sapiens
EVEVVESGGGLVQPGGSLRLSCAASGFSFSSYWMSWVRQAPGKGLEWVANINEDGSKKFYVDSVRGRFTISRDNAKTSVFLQMDSLRAEDTALYYCA

SEQ ID NO: 7976 - protein, 119 aa, Homo sapiens
EVEVVESGGGLVQPGGSLRLSCAASGFSFSSYWMSWVRQAPGKGLEWVANINEDGSKKFYVDSVRGRFTISRDNAKTSVFLQMDSLRAEDTALYYCASPYYDYRPQLYRGQGTLVTVSS

SEQ ID NO: 7977 - protein, 7 aa, Homo sapiens
EVFGRFS

SEQ ID NO: 7978 - protein, 7 aa, Homo sapiens
EVFGRFS

SEQ ID NO: 7979 - protein, 98 aa, Homo sapiens
EVFLVESGGNLVQPGGSLRLSCAASGFAFSHHWMTWVRQAPRKGLEWVANIKGDGSETQYVDSVKGLFTISRDNAKNTLYLQMTGLRVEDTAVYYCAR

SEQ ID NO: 7980 - protein, 122 aa, Homo sapiens
EVFLVESGGNLVQPGGSLRLSCAASGFAFSHHWMTWVRQAPRKGLEWVANIKGDGSETQYVDSVKGLFTISRDNAKNTLYLQMTGLRVEDTAVYYCARNLHNNDAWFLGDYWGQGALVTVSS

SEQ ID NO: 7981 - protein, 7 aa, Homo sapiens
EVFNRFS

SEQ ID NO: 7982 - protein, 7 aa, Homo sapiens
EVGERPS

SEQ ID NO: 7983 - protein, 98 aa, Homo sapiens
EVHLAESGGVLVQPGGSLRLSCAASGFAFSASEMNWVRQAPGKGLEWVSYINERGDNIYYADSVKGRFIISRDNAKNSLYLQMNSLRVEDTAVYYCVR

SEQ ID NO: 7984 - protein, 120 aa, Homo sapiens
EVHLAESGGVLVQPGGSLRLSCAASGFAFSASEMNWVRQAPGKGLEWVSYINERGDNIYYADSVKGRFIISRDNAKNSLYLQMNSLRVEDTAVYYCVRNQAGSGWPFDYWGQGTVVTVSS

SEQ ID NO: 7985 - protein, 98 aa, Homo sapiens
EVHLLESGGGLEQPGGSLRLSCAASGFTFRAYAMSWVRQAPGKGLEWVSSIRFTDGTTYYAGSVEGRFTISRDDSKNTLFLQMNRLRVEDTAVYYCVK

SEQ ID NO: 7986 - protein, 125 aa, Homo sapiens
EVHLLESGGGLEQPGGSLRLSCAASGFTFRAYAMSWVRQAPGKGLEWVSSIRFTDGTTYYAGSVEGRFTISRDDSKNTLFLQMNRLRVEDTAVYYCVKDWGPGDSCGSGSCLSKWGQGTLVTVSS

SEQ ID NO: 7987 - protein, 97 aa, Homo sapiens
EVHLLESGGGLVQPGGSLRLSCAASGFTFSSYAMGWVRQAPGKGLEWVSDIITGGRTYYADSVKGRFTISRDNSKDTLYLQMNSLRADDTALYSCAK

SEQ ID NO: 7988 - protein, 119 aa, Homo sapiens
EVHLLESGGGLVQPGGSLRLSCAASGFTFSSYAMGWVRQAPGKGLEWVSDIITGGRTYYADSVKGRFTISRDNSKDTLYLQMNSLRADDTALYSCAKSRGARVGAFDIWGQGTMVTVSS

SEQ ID NO: 7989 - protein, 95 aa, Homo sapiens
EVHLVESGGDLVQPGGSLRLSCAASGLTIRNYAMSWVRQAPGKGLEWVSAISGGFDRTFYADSVKGRFTISRDSSKNTLYLQMISLRAEDTALYY

SEQ ID NO: 7990 - protein, 117 aa, Homo sapiens
EVHLVESGGDLVQPGGSLRLSCAASGLTIRNYAMSWVRQAPGKGLEWVSAISGGFDRTFYADSVKGRFTISRDSSKNTLYLQMISLRAEDTALYYCLMRGNNNCPYWGQGTLVTVSS

SEQ ID NO: 7991 - protein, 98 aa, Homo sapiens
EVHLVESGGDVVRPGGSLRLSCAASGFTFRDYVMTWVRQAPGKGLEWVSAITWNGGNTAYADSVKGRFTISRDNARNSLFLQLNNLRAEDTAYYFCAR

SEQ ID NO: 7992 - protein, 121 aa, Homo sapiens
EVHLVESGGDVVRPGGSLRLSCAASGFTFRDYVMTWVRQAPGKGLEWVSAITWNGGNTAYADSVKGRFTISRDNARNSLFLQLNNLRAEDTAYYFCAREGRSTIAGAFDIWGQGTTVIVSS

SEQ ID NO: 7993 - protein, 100 aa, Homo sapiens
EVHLVESGGGLVQPGESLRLSCAASGFTFSDHYMDWVRQAPGKGLEWVGVSRNKANKYTTEYAASVKGRFAVSRDDSTNSLYLQMDSLKNEDTAVYFCVR

SEQ ID NO: 7994 - protein, 123 aa, Homo sapiens
EVHLVESGGGLVQPGESLRLSCAASGFTFSDHYMDWVRQAPGKGLEWVGVSRNKANKYTTEYAASVKGRFAVSRDDSTNSLYLQMDSLKNEDTAVYFCVRSVQTTGGWKLDPWGPGTLVTVSS

SEQ ID NO: 7995 - protein, 100 aa, Homo sapiens
EVHLVESGGGLVQPGESLRLSCAASGFTFSDHYMDWVRQAPGKGLEWVGVSRNKANKYTTEYAASVKGRFAVSRDDSTNSLYLQMHSLKNEDTAVYFCAR

SEQ ID NO: 7996 - protein, 123 aa, Homo sapiens
EVHLVESGGGLVQPGESLRLSCAASGFTFSDHYMDWVRQAPGKGLEWVGVSRNKANKYTTEYAASVKGRFAVSRDDSTNSLYLQMHSLKNEDTAVYFCARSVETTGGWKLDPWGPGTLVTVSS

SEQ ID NO: 7997 - protein, 99 aa, Homo sapiens
EVHLVESGGGLVQPGGSLRLSCAASGFTFDDYAMHWVRQAPGKGLEWVSSINWNTISIGYADSVKGRFTISRDNAKNSLYLQMNSLRAEDTALYYCVKD

SEQ ID NO: 7998 - protein, 122 aa, Homo sapiens
EVHLVESGGGLVQPGGSLRLSCAASGFTFDDYAMHWVRQAPGKGLEWVSSINWNTISIGYADSVKGRFTISRDNAKNSLYLQMNSLRAEDTALYYCVKDISVVVPTGAFDIWGQGTMVTVSS

SEQ ID NO: 7999 - protein, 97 aa, Homo sapiens
EVHLVESGGGLVQPGGSLRLSCAASGFTFSDYWMTWVRQVPGKGLEWLANIKGDGTEKNYVDSVKGRFTVSRDNAKNSLFLQVNSLRVEDTAVYYCA

SEQ ID NO: 8000 - protein, 122 aa, Homo sapiens
EVHLVESGGGLVQPGGSLRLSCAASGFTFSDYWMTWVRQVPGKGLEWLANIKGDGTEKNYVDSVKGRFTVSRDNAKNSLFLQVNSLRVEDTAVYYCARHIYYGNNWYLGDLWGQGAPVTVSS

SEQ ID NO: 8001 - protein, 98 aa, Homo sapiens
EVHLVESGGGLVQPGGSLRLSCAASGFTFSGYWMSWVRQAPGKGLEWVASISEDGDVKKYVDSVKGRFTISRDNGKDSLYLQMNSLRDEDTAVYYCSR

SEQ ID NO: 8002 - protein, 127 aa, Homo sapiens
EVHLVESGGGLVQPGGSLRLSCAASGFTFSGYWMSWVRQAPGKGLEWVASISEDGDVKKYVDSVKGRFTISRDNGKDSLYLQMNSLRDEDTAVYYCSRDEGDSGSYNTLSSAFEAVWGQGSLVTVSS

SEQ ID NO: 8003 - protein, 97 aa, Homo sapiens
EVHLVESGGGLVQPGGSLRLSCAASGFTFSNYWMSWVRQAPGKGLEWVANIKGDGSERYYVDSVKGRFTISRDNAQNSMYLQMNNLRVEDTAVYYCA

SEQ ID NO: 8004 - protein, 117 aa, Homo sapiens
EVHLVESGGGLVQPGGSLRLSCAASGFTFSNYWMSWVRQAPGKGLEWVANIKGDGSERYYVDSVKGRFTISRDNAQNSMYLQMNNLRVEDTAVYYCANLWEGIGSFWGQGTLVTVSS

SEQ ID NO: 8005 - protein, 97 aa, Homo sapiens
EVHLVESGGGLVQPGGSLRLSCAASGFTFSRYEMNWVRQAPGKGLEWVSYISSSGFTIYYADSVKGRFTISRDNAKNSLSLQMNTLRVEDTAVYYCA

SEQ ID NO: 8006 - protein, 117 aa, Homo sapiens
EVHLVESGGGLVQPGGSLRLSCAASGFTFSRYEMNWVRQAPGKGLEWVSYISSSGFTIYYADSVKGRFTISRDNAKNSLSLQMNTLRVEDTAVYYCASGIMAAFDHWGQGTLVTVSS

SEQ ID NO: 8007 - protein, 97 aa, Homo sapiens
EVHLVESGGGLVQPGGSLRLSCAASGFTVSSKYMSWVRQAPGKGLEWVSVIYSGDITYYSNSVRGRFTISRDNSRNTLYLQMNSLRAEDTAVYYCAR

SEQ ID NO: 8008 - protein, 119 aa, Homo sapiens
EVHLVESGGGLVQPGGSLRLSCAASGFTVSSKYMSWVRQAPGKGLEWVSVIYSGDITYYSNSVRGRFTISRDNSRNTLYLQMNSLRAEDTAVYYCARGTDSAATRVDAWGQGTTVTVSS

SEQ ID NO: 8009 - protein, 97 aa, Homo sapiens
EVHLVESGGGLVQPGGSLRLSCAASGFTVSSNYMSWVRQAPGKGLEWVSVIYSGSRTFYAASVKGRFTISRHDSKNTLYLQMNSLRVEDTAVYYCVR

SEQ ID NO: 8010 - protein, 128 aa, Homo sapiens
EVHLVESGGGLVQPGGSLRLSCAASGFTVSSNYMSWVRQAPGKGLEWVSVIYSGSRTFYAASVKGRFTISRHDSKNTLYLQMNSLRVEDTAVYYCVRTSSHANSSSWEAYYSYVMDVWGQGTTVTVSS

SEQ ID NO: 8011 - protein, 97 aa, Homo sapiens
EVHLVESGGGLVQPGGSLRLSCAASGFVFSRYWMTWVRQAPGKGLEWVANIKEDGSAEYYVDSVKGRFAVSRDNAKNLLYLQMNSLRAEDTAVYYCS

SEQ ID NO: 8012 - protein, 115 aa, Homo sapiens
EVHLVESGGGLVQPGGSLRLSCAASGFVFSRYWMTWVRQAPGKGLEWVANIKEDGSAEYYVDSVKGRFAVSRDNAKNLLYLQMNSLRAEDTAVYYCSIFYPDDYRGQGTLVTVSS

SEQ ID NO: 8013 - protein, 98 aa, Homo sapiens
EVHLVESGGGLVQPGGSLRLSCATSGFTFDTYSMAWVRQAPDKGLEWVANMKHDGSEKNYVDSVKGRFTISRDNARNSLFLQMNSLRVEDSALYYCAR

SEQ ID NO: 8014 - protein, 123 aa, Homo sapiens
EVHLVESGGGLVQPGGSLRLSCATSGFTFDTYSMAWVRQAPDKGLEWVANMKHDGSEKNYVDSVKGRFTISRDNARNSLFLQMNSLRVEDSALYYCARLLSYEISTYRPLDSWGQGTLVTVSS

SEQ ID NO: 8015 - protein, 97 aa, Homo sapiens
EVHLVESGGGLVQPGGSLRLSCVASGFTFSRSEMNWVRQAPGKGLEWVSYISHTGNTIYYADSLKGRFTISRDNAKNTLYLQMNSLRVEDTAIYYCA

SEQ ID NO: 8016 - protein, 123 aa, Homo sapiens
EVHLVESGGGLVQPGGSLRLSCVASGFTFSRSEMNWVRQAPGKGLEWVSYISHTGNTIYYADSLKGRFTISRDNAKNTLYLQMNSLRVEDTAIYYCASTDWYINNWGSAFDYWGQGILVTVSS

SEQ ID NO: 8017 - protein, 97 aa, Homo sapiens
EVHLVESGGGLVQPGRSLRLSCAASGFIFDDYAMQWVRQAPGKGLEWVSGISWSSGSIGYADSVKGRFTISRDNAKNSLYLQMNSLRLDDTAFYFCA

SEQ ID NO: 8018 - protein, 119 aa, Homo sapiens
EVHLVESGGGLVQPGRSLRLSCAASGFIFDDYAMQWVRQAPGKGLEWVSGISWSSGSIGYADSVKGRFTISRDNAKNSLYLQMNSLRLDDTAFYFCARGAGSGSYSDQLGQGTLVSVSS

SEQ ID NO: 8019 - protein, 97 aa, Homo sapiens
EVHLVESGGGLVQPGRSLRLSCAASGFNFEDYAMHWVRQVPGKGLEWVSGINWNSEDMAHADSVRGRFTISRDNAKESLYLQMDSLRTEDTALYFCA

SEQ ID NO: 8020 - protein, 125 aa, Homo sapiens
EVHLVESGGGLVQPGRSLRLSCAASGFNFEDYAMHWVRQVPGKGLEWVSGINWNSEDMAHADSVRGRFTISRDNAKESLYLQMDSLRTEDTALYFCAKVGRRGGGGWRAGHFDNWGQGTLVTVSS

SEQ ID NO: 8021 - protein, 100 aa, Homo sapiens
EVHLVESGGGLVQPGRSLRLSCTGSGFTFGDFAMTWVRQSPGKGLEWVGFIRRKAYGGTTEYAASVKGRFTISRDDSESIAFLQMSSLKTEDTGVYFCTR

SEQ ID NO: 8022 - protein, 132 aa, Homo sapiens
EVHLVESGGGLVQPGRSLRLSCTGSGFTFGDFAMTWVRQSPGKGLEWVGFIRRKAYGGTTEYAASVKGRFTISRDDSESIAFLQMSSLKTEDTGVYFCTREQRIRLGEFSLYDPSYYYMDVWGQGTTVTVSS

SEQ ID NO: 8023 - protein, 98 aa, Homo sapiens
EVHLVESGGGLVQTGGSLRLSCGASGFTFRDYAMTWVRQAPGKGLEWVSTTRNNRGRTSYADSVKGRFTISRDDSKNTLYLQMNSLRAEDTAVYYCAK

SEQ ID NO: 8024 - protein, 122 aa, Homo sapiens
EVHLVESGGGLVQTGGSLRLSCGASGFTFRDYAMTWVRQAPGKGLEWVSTTRNNRGRTSYADSVKGRFTISRDDSKNTLYLQMNSLRAEDTAVYYCAKDMRSGSDFPLFDFWGQGTLVTVSS

SEQ ID NO: 8025 - protein, 98 aa, Homo sapiens
EVHLVESGGGSVQPGGSLTLSCTASGFTFNNYWMTWVRQAPGKGLEWVASIKEDESEKNYVDSVKGRFTVSRDNAKYTMSLQMNSLTAEDTAVYYCAR

SEQ ID NO: 8026 - protein, 123 aa, Homo sapiens
EVHLVESGGGSVQPGGSLTLSCTASGFTFNNYWMTWVRQAPGKGLEWVASIKEDESEKNYVDSVKGRFTVSRDNAKYTMSLQMNSLTAEDTAVYYCARTAGDSSTFYRAFDIRGPGTMVTVSS

SEQ ID NO: 8027 - protein, 98 aa, Homo sapiens
EVHLVESGGNLVQPGGSLRLSCAASGFTFGSYWMTWVRQAPGKGLEWVATLKQDGSKIYYVDSMKGRVTISRDNAKNSLYLQMNSLRVEDTAVYYCAR

SEQ ID NO: 8028 - protein, 125 aa, Homo sapiens
EVHLVESGGNLVQPGGSLRLSCAASGFTFGSYWMTWVRQAPGKGLEWVATLKQDGSKIYYVDSMKGRVTISRDNAKNSLYLQMNSLRVEDTAVYYCARDGREDHGSGSYSQFDYWGQGTLVTVSS

SEQ ID NO: 8029 - protein, 99 aa, Homo sapiens
EVHLVESGGTSVQPGGSLRLSCTASGFIFSDYPMNWVRQAPGKGLEWISYISGSSRNSIFYADSVKGRFTISRDNARNSLYLQMSSLRADDTAVYYCAR

SEQ ID NO: 8030 - protein, 122 aa, Homo sapiens
EVHLVESGGTSVQPGGSLRLSCTASGFIFSDYPMNWVRQAPGKGLEWISYISGSSRNSIFYADSVKGRFTISRDNARNSLYLQMSSLRADDTAVYYCARDRDDGGWYLGAYWGQGTLVTVST

SEQ ID NO: 8031 - protein, 97 aa, Homo sapiens
EVHLWESGGTLIQPGGSLRLSCGASGFTFSKYAMTWVRQAPGKGLEWVSVLPGSGKSPSYADFARGRFVISRDNSRNMVYLLLNSLTAEDTAIYYCA

SEQ ID NO: 8032 - protein, 127 aa, Homo sapiens
EVHLWESGGTLIQPGGSLRLSCGASGFTFSKYAMTWVRQAPGKGLEWVSVLPGSGKSPSYADFARGRFVISRDNSRNMVYLLLNSLTAEDTAIYYCANSGWAYEEGSWVYDYNMDVWGKGTTVIVSS

SEQ ID NO: 8033 - protein, 97 aa, Homo sapiens
EVKLVESGGGLVQPGGSLRLSCAATGFTFSNYGMSWVRQAPGKGLEWVAFISGSGGSTYYADSVKGRFTISRDNSKNTLYLQMNSLRVEDTAVYYCA

SEQ ID NO: 8034 - protein, 122 aa, Homo sapiens
EVKLVESGGGLVQPGGSLRLSCAATGFTFSNYGMSWVRQAPGKGLEWVAFISGSGGSTYYADSVKGRFTISRDNSKNTLYLQMNSLRVEDTAVYYCAKMGRLPTTNRWFDPWGQGTLVTVSS

SEQ ID NO: 8035 - protein, 98 aa, Homo sapiens
EVKLVESGGGLVQPGGSLRLSCGASGFTFSSYAMSWVRQAPGKGLEWISGISSSGDTTSYAASVKGRFTISRDRSKSMLYLQMDSLTDADTAMYYCAK

SEQ ID NO: 8036 - protein, 119 aa, Homo sapiens
EVKLVESGGGLVQPGGSLRLSCGASGFTFSSYAMSWVRQAPGKGLEWISGISSSGDTTSYAASVKGRFTISRDRSKSMLYLQMDSLTDADTAMYYCAKDGGSKTPERHWGQGTLVIVSS

SEQ ID NO: 8037 - protein, 96 aa, Homo sapiens
EVKLVESGGGLVQPGGSLRLSCVSSGFRFNNYNLNWVRQAPGKGLEWVAYISHSSSDIYYVDSVKGRFTISRDNAENSLYLQMNGLRAEDTAVYSC

SEQ ID NO: 8038 - protein, 120 aa, Homo sapiens
EVKLVESGGGLVQPGGSLRLSCVSSGFRFNNYNLNWVRQAPGKGLEWVAYISHSSSDIYYVDSVKGRFTISRDNAENSLYLQMNGLRAEDTAVYSCLVDNWSSFDGFNIWGQGTMVTVSS

SEQ ID NO: 8039 - protein, 97 aa, Homo sapiens
EVKLVESGGGLVQPGGSLRLTCVASGFSVSSTHMKWIRRVPGKGLEWVSIIYRDTTIYNADSVKGRFFVSRDILRNTVYLQMNSLKTEDTGIYYCAR

SEQ ID NO: 8040 - protein, 119 aa, Homo sapiens
EVKLVESGGGLVQPGGSLRLTCVASGFSVSSTHMKWIRRVPGKGLEWVSIIYRDTTIYNADSVKGRFFVSRDILRNTVYLQMNSLKTEDTGIYYCARDQAETQFYFDLWGRGTLVTVSS

SEQ ID NO: 8041 - protein, 98 aa, Homo sapiens
EVKLVESGGGLVQPGRSLRLSCAASGFIFDDYAMHWVRQAPGKGLEWVSGISWNSGAIGYAASVKGRFTISRDNAKNSVFLQMNSLRGEDTAFYYCAR

SEQ ID NO: 8042 - protein, 119 aa, Homo sapiens
EVKLVESGGGLVQPGRSLRLSCAASGFIFDDYAMHWVRQAPGKGLEWVSGISWNSGAIGYAASVKGRFTISRDNAKNSVFLQMNSLRGEDTAFYYCARGEGSGSYSDYWGQGTLVAVSS

SEQ ID NO: 8043 - protein, 17 aa, Homo sapiens
EVKSNGGNTQYAQRFQG

SEQ ID NO: 8044 - protein, 97 aa, Homo sapiens
EVKVVESGGGLVQPGGSLKISCAVSGFSIDNQWMSWVRQAPGKGLEWVANIKEDGSDRDYVDSVKGRFIISRDNPENSVYLQMNSLRAEDTAVYYCA

SEQ ID NO: 8045 - protein, 122 aa, Homo sapiens
EVKVVESGGGLVQPGGSLKISCAVSGFSIDNQWMSWVRQAPGKGLEWVANIKEDGSDRDYVDSVKGRFIISRDNPENSVYLQMNSLRAEDTAVYYCAHPLRGSSRYDGFQIWGHGTLVTVFS

SEQ ID NO: 8046 - protein, 98 aa, Homo sapiens
EVLLLESGGGLMKPGGSLRLSCAASGFTFSSHAFHWVRQAPGKGLEWVSFISATGLSTYYADSVKGRFTISRDDSKNRVYLQVSSLRADDTAVYYCAR

SEQ ID NO: 8047 - protein, 123 aa, Homo sapiens
EVLLLESGGGLMKPGGSLRLSCAASGFTFSSHAFHWVRQAPGKGLEWVSFISATGLSTYYADSVKGRFTISRDDSKNRVYLQVSSLRADDTAVYYCARGQGRPITGTGILDSWGQGTPVTVSS

SEQ ID NO: 8048 - protein, 97 aa, Homo sapiens
EVLLLESGGTLVQPGGSLRLSCAASGFTFTDYAMNWVRQAPGKGLEWVSAIRGDGGGTHYAGSVKGRVTISRDNSKNLLFLQMNSLRAEDTAVYYCA

SEQ ID NO: 8049 - protein, 127 aa, Homo sapiens
EVLLLESGGTLVQPGGSLRLSCAASGFTFTDYAMNWVRQAPGKGLEWVSAIRGDGGGTHYAGSVKGRVTISRDNSKNLLFLQMNSLRAEDTAVYYCARCVSSTEPNSSGWCNWFDPWGQGTRVTVSS

SEQ ID NO: 8050 - protein, 98 aa, Homo sapiens
EVLLVESGGGLAHPGGSLRLSCTASGFSFSTYGMMWIRQAPGKGLEWVSSISSTGLSRYYVDSVKGRFTISRDDAKSSVHLQMSSLRVDDSAVYYCVR

SEQ ID NO: 8051 - protein, 122 aa, Homo sapiens
EVLLVESGGGLAHPGGSLRLSCTASGFSFSTYGMMWIRQAPGKGLEWVSSISSTGLSRYYVDSVKGRFTISRDDAKSSVHLQMSSLRVDDSAVYYCVRGPRVSFSPANFAFWGHGTMVRVSS

SEQ ID NO: 8052 - protein, 100 aa, Homo sapiens
EVLLVESGGGLVMPGGSLRLSCAASGFTFNNAWMSWVRQAPGKGLEWVGRIKSKTNGGATDYAAPVKGRFTISRDDSEDTMYLQMNTLKSEDTGIYYCST

SEQ ID NO: 8053 - protein, 121 aa, Homo sapiens
EVLLVESGGGLVMPGGSLRLSCAASGFTFNNAWMSWVRQAPGKGLEWVGRIKSKTNGGATDYAAPVKGRFTISRDDSEDTMYLQMNTLKSEDTGIYYCSTGLTTGWSLGYWGQGTLVTVSS

SEQ ID NO: 8054 - protein, 99 aa, Homo sapiens
EVLLVESGGGLVQPGGSLRLSCAASGFTFSNYAMTWVRQAPGKGLEWVSSISGNRDANTYYADSVKGRFTISRDNSRNTLYLQMNSLRAEDTAVYYCAR

SEQ ID NO: 8055 - protein, 121 aa, Homo sapiens
EVLLVESGGGLVQPGGSLRLSCAASGFTFSNYAMTWVRQAPGKGLEWVSSISGNRDANTYYADSVKGRFTISRDNSRNTLYLQMNSLRAEDTAVYYCARGTDSAATRVDAWGQGTTVTVSS

SEQ ID NO: 8056 - protein, 98 aa, Homo sapiens
EVLLVESGGGLVQPGGSLRLSCDASGFNFSTFEMNWVRQAPGKGLEWVAYISIRGDIRYYADSVKGRFTISRDNAKKSLFLEMRSLRVEDTAFYFCAR

SEQ ID NO: 8057 - protein, 118 aa, Homo sapiens
EVLLVESGGGLVQPGGSLRLSCDASGFNFSTFEMNWVRQAPGKGLEWVAYISIRGDIRYYADSVKGRFTISRDNAKKSLFLEMRSLRVEDTAFYFCARVDYLAGIPYWGQGSLVTVSS

SEQ ID NO: 8058 - protein, 98 aa, Homo sapiens
EVLLVESGGGLVQPGGSLRLSCTASGFTFSRHPMNWVRQAPGRGLEWVSYINGESKGVYYGDSVKGRFTTSRDNAKNVLYLQMSSLRDEDTAVYFCVR

SEQ ID NO: 8059 - protein, 120 aa, Homo sapiens
EVLLVESGGGLVQPGGSLRLSCTASGFTFSRHPMNWVRQAPGRGLEWVSYINGESKGVYYGDSVKGRFTTSRDNAKNVLYLQMSSLRDEDTAVYFCVRGDITGWLLEATWGQGTLVTVSS

SEQ ID NO: 8060 - protein, 99 aa, Homo sapiens
EVLLVESGGGLVQPGGTLRLSCAASGFSFNKYAMSWVRQAPGKGLEWVSGISGNREGNRYYADSVRGRFTISRDNSRNTLYLQMNSLRAEDTAVYYCAR

SEQ ID NO: 8061 - protein, 121 aa, Homo sapiens
EVLLVESGGGLVQPGGTLRLSCAASGFSFNKYAMSWVRQAPGKGLEWVSGISGNREGNRYYADSVRGRFTISRDNSRNTLYLQMNSLRAEDTAVYYCARGTDSAATRVDAWGQGTTVTVSS

SEQ ID NO: 8062 - protein, 99 aa, Homo sapiens
EVLLVESGGGLVQPGRSLRLSCAASGFTFDNYAMHWVRQAPGKGLEWVSGISWDSGSTEYAESVKGRFTISRDNAKNSVFLQMNSLRLEDTAFYYCAKD

SEQ ID NO: 8063 - protein, 122 aa, Homo sapiens
EVLLVESGGGLVQPGRSLRLSCAASGFTFDNYAMHWVRQAPGKGLEWVSGISWDSGSTEYAESVKGRFTISRDNAKNSVFLQMNSLRLEDTAFYYCAKDTGSSWYGQGTDYWGQGTQVTVSS

SEQ ID NO: 8064 - protein, 98 aa, Homo sapiens
EVLLVESGGGVVQPGGSLRLSCASSGFTFDDYAMHWVRQAPGKGLEWVSLISGDGGSTYYVDSVKGRFSISRDNSKKSLYLQMNSLRTEDTALYYCAK

SEQ ID NO: 8065 - protein, 124 aa, Homo sapiens
EVLLVESGGGVVQPGGSLRLSCASSGFTFDDYAMHWVRQAPGKGLEWVSLISGDGGSTYYVDSVKGRFSISRDNSKKSLYLQMNSLRTEDTALYYCAKDSLMFDSSAYYGIDYWGQGTLVTVSS

SEQ ID NO: 8066 - protein, 98 aa, Homo sapiens
EVLLVESGGRLVQPGGSLRLSCVASGFTFSNSGMNWVRQAPGKGLEWVSYISSSRGSMYYADSVKGRFTISRDNAKNSLYLQMNSLRAEDTAVYYCAT

SEQ ID NO: 8067 - protein, 123 aa, Homo sapiens
EVLLVESGGRLVQPGGSLRLSCVASGFTFSNSGMNWVRQAPGKGLEWVSYISSSRGSMYYADSVKGRFTISRDNAKNSLYLQMNSLRAEDTAVYYCATVGGVLGATLGRNDYWGRGTLVTVSS

SEQ ID NO: 8068 - protein, 99 aa, Homo sapiens
EVLLVESGGTLLQPGGSLRLSCAASGFTFNHYAMTWVRQAPGKGLEWVSSISGNPNANRYYADSVKGRFTISRDNSKSTLYLLANSLRVEDTAVYYCAR

SEQ ID NO: 8069 - protein, 126 aa, Homo sapiens
EVLLVESGGTLLQPGGSLRLSCAASGFTFNHYAMTWVRQAPGKGLEWVSSISGNPNANRYYADSVKGRFTISRDNSKSTLYLLANSLRVEDTAVYYCARDWVDNSDWSSQPVFDYWGQGTLVTVSS

SEQ ID NO: 8070 - protein, 95 aa, Homo sapiens
EVLLVQSGAEVKKPGATVRISCRVSGFTLSDSYMHWVKQAPGKGLEWMGLIDPEVDETQYAEKFQGRVTISADTSRDTVYMDLSDLTSEDTAVYY

SEQ ID NO: 8071 - protein, 125 aa, Homo sapiens
EVLLVQSGAEVKKPGATVRISCRVSGFTLSDSYMHWVKQAPGKGLEWMGLIDPEVDETQYAEKFQGRVTISADTSRDTVYMDLSDLTSEDTAVYYCVKEGSDILTHYHPQILHYWGQGSLITVSS

SEQ ID NO: 8072 - protein, 97 aa, Homo sapiens
EVLLVQSGPEFKKPGESLRISCEASGYSLITYWIAWVRQRPGKGLEWMGLVFPGDSDTRYSPSFQGQVTISADKSTTIAYLQWGSLKASDTAMYYCA

SEQ ID NO: 8073 - protein, 121 aa, Homo sapiens
EVLLVQSGPEFKKPGESLRISCEASGYSLITYWIAWVRQRPGKGLEWMGLVFPGDSDTRYSPSFQGQVTISADKSTTIAYLQWGSLKASDTAMYYCAKSRGFGELFTFDAWGQGTLVTVSS

SEQ ID NO: 8074 - protein, 98 aa, Homo sapiens
EVLVLESGGGLVQPGGSLRLSCTASGFTFNSYAMSWVRQAPGKGLEWVSSIQGSGDGTYDADSVKGRFTISRENSRNTVYLQMNSLRAEDTAVYYCAR

SEQ ID NO: 8075 - protein, 120 aa, Homo sapiens
EVLVLESGGGLVQPGGSLRLSCTASGFTFNSYAMSWVRQAPGKGLEWVSSIQGSGDGTYDADSVKGRFTISRENSRNTVYLQMNSLRAEDTAVYYCARGTDSAATRVDAWGQGTTVTVSS

SEQ ID NO: 8076 - protein, 11 aa, Homo sapiens
EVLYGGYYFDY

SEQ ID NO: 8077 - protein, 7 aa, Homo sapiens
EVNDRPS

SEQ ID NO: 8078 - protein, 16 aa, Homo sapiens
EVNHSGSTKYHPSLKS

SEQ ID NO: 8079 - protein, 7 aa, Homo sapiens
EVNKRPS

SEQ ID NO: 8080 - protein, 7 aa, Homo sapiens
EVNNRPF

SEQ ID NO: 8081 - protein, 98 aa, Homo sapiens
EVQLAESGGGLVQPGGSLRLSCAASGFTFSDSWMSWVRQAPGKGLEWLTDIKKDGSVTYSVESVKGRFTISRDNAKNLLYLQMNSLRAEDTAVYYCAR

SEQ ID NO: 8082 - protein, 121 aa, Homo sapiens
EVQLAESGGGLVQPGGSLRLSCAASGFTFSDSWMSWVRQAPGKGLEWLTDIKKDGSVTYSVESVKGRFTISRDNAKNLLYLQMNSLRAEDTAVYYCARDQSGGGSWYFDLWGRGTLVTVSS

SEQ ID NO: 8083 - protein, 98 aa, Homo sapiens
EVQLAESGGGLVQPGGSLRLSCAASGFTFSSYWMTWVRQAPGKGLEWVANIKQDGSEKYYVDSVKGRCTISRDNAKNSLYLQMNSLRAEDTAVYYCAR

SEQ ID NO: 8084 - protein, 124 aa, Homo sapiens
EVQLAESGGGLVQPGGSLRLSCAASGFTFSSYWMTWVRQAPGKGLEWVANIKQDGSEKYYVDSVKGRCTISRDNAKNSLYLQMNSLRAEDTAVYYCARVDLRYDSSGYRPLDFWGQGTLVTVSS

SEQ ID NO: 8085 - protein, 97 aa, Homo sapiens
EVQLAESGGGLVQPGGSLRLSCAASGFTLSTYWMTWVRQAPGRGLEWVANIKYDGSEGSYLDSVKGRFTVSRDNAKNSLFLEMNNLRAEDTAVYYCA

SEQ ID NO: 8086 - protein, 123 aa, Homo sapiens
EVQLAESGGGLVQPGGSLRLSCAASGFTLSTYWMTWVRQAPGRGLEWVANIKYDGSEGSYLDSVKGRFTVSRDNAKNSLFLEMNNLRAEDTAVYYCARLYLFEDSGYRSIDYWGQGTLVTVSS

SEQ ID NO: 8087 - protein, 98 aa, Homo sapiens
EVQLAESGGGLVQPGGSLRLSCFTSGFTFSSYYMSWVRQAPGKGLEWVANIKQDKSEENYVDSVKGRFTISRDNAKNSLYLQMNSLRAEDTAIYFCAR

SEQ ID NO: 8088 - protein, 124 aa, Homo sapiens
EVQLAESGGGLVQPGGSLRLSCFTSGFTFSSYYMSWVRQAPGKGLEWVANIKQDKSEENYVDSVKGRFTISRDNAKNSLYLQMNSLRAEDTAIYFCARVQSYDRQDYYRHFDYWGQGILVTVSS

SEQ ID NO: 8089 - protein, 97 aa, Homo sapiens
EVQLAESGGGLVQPGRSLRLSCAASGFTFDDYAMHWVRQAPGKGLEWLSGISWDSGAIGYAASVRGRFSISRDNAKRTLYLQMNSLRPEDTALYFCA

SEQ ID NO: 8090 - protein, 119 aa, Homo sapiens
EVQLAESGGGLVQPGRSLRLSCAASGFTFDDYAMHWVRQAPGKGLEWLSGISWDSGAIGYAASVRGRFSISRDNAKRTLYLQMNSLRPEDTALYFCARSLGSGSYSSDWGQGTLVTVSS

SEQ ID NO: 8091 - protein, 97 aa, Homo sapiens
EVQLAESGGGLVQPGRSLRLSCEASGFTFEDYAMQWVRQVPGKGLEWVAGISWDSATKGYADSVKGRFTVSRDNAKNSLFLQMNSLKSADTAFYFCA

SEQ ID NO: 8092 - protein, 120 aa, Homo sapiens
EVQLAESGGGLVQPGRSLRLSCEASGFTFEDYAMQWVRQVPGKGLEWVAGISWDSATKGYADSVKGRFTVSRDNAKNSLFLQMNSLKSADTAFYFCASAPYGSGSFADSWGQGTLVTVSS

SEQ ID NO: 8093 - protein, 98 aa, Homo sapiens
EVQLEESGGGLVQPGGPRRLSCAASGFTFSRHSMSWVRQAPGKGLEWLAHISHSSKRIYYADSVKGRFSISRDNVRNSLYLQMDSLTAEDTALYYCAR

SEQ ID NO: 8094 - protein, 129 aa, Homo sapiens
EVQLEESGGGLVQPGGPRRLSCAASGFTFSRHSMSWVRQAPGKGLEWLAHISHSSKRIYYADSVKGRFSISRDNVRNSLYLQMDSLTAEDTALYYCARESATEGFGELSFRGDHAFDLWGQGTLLTVSS

SEQ ID NO: 8095 - protein, 97 aa, Homo sapiens
EVQLEESGGGLVQPGGSLRLSCATSGFTFSSKWMHWVRQAPGKGLVWVSHINSDGSSTSYADSVKGRFTISRDNAKNTLYLQMNSLRVEDTAVYYCA

SEQ ID NO: 8096 - protein, 128 aa, Homo sapiens
EVQLEESGGGLVQPGGSLRLSCATSGFTFSSKWMHWVRQAPGKGLVWVSHINSDGSSTSYADSVKGRFTISRDNAKNTLYLQMNSLRVEDTAVYYCASLRRRKEEEDYSGIYEAFDIWGQGTMVTVSS

SEQ ID NO: 8097 - protein, 100 aa, Homo sapiens
EVQLEESGGGLVQPGGSLRLSCVGSGFILSDYYIDWVRQAPGKGLEWVGRSRNKANRYSTDYTASVKGRFTVSRDDSSNSLYLQMNSLKTEDTAVYYCTR

SEQ ID NO: 8098 - protein, 126 aa, Homo sapiens
EVQLEESGGGLVQPGGSLRLSCVGSGFILSDYYIDWVRQAPGKGLEWVGRSRNKANRYSTDYTASVKGRFTVSRDDSSNSLYLQMNSLKTEDTAVYYCTRPTNCGGDCDYDAFDIWGQGTMVTVSS

SEQ ID NO: 8099 - protein, 98 aa, Homo sapiens
EVQLLDSGGGLVQPGGSLRLSCEASGFTLRNYAMSWVRQAPGKGLEWVSVISGSGGSRYYADSVKGRFTISRDDSKNTLYLHMNSLRADDTAVYYCAK

SEQ ID NO: 8100 - protein, 122 aa, Homo sapiens
EVQLLDSGGGLVQPGGSLRLSCEASGFTLRNYAMSWVRQAPGKGLEWVSVISGSGGSRYYADSVKGRFTISRDDSKNTLYLHMNSLRADDTAVYYCAKDIRSTPPAGITDYWGQGTQVTVSS

SEQ ID NO: 8101 - protein, 98 aa, Homo sapiens
EVQLLESGGALVQPGGSLRLSCAASQFSISSYTVTWVRQAPGKGLEWVSSIIGGGVSTYYADSVKGRFTLSRDNSKNILYLQMNSLRAEDTAVYYCAR

SEQ ID NO: 8102 - protein, 122 aa, Homo sapiens
EVQLLESGGALVQPGGSLRLSCAASQFSISSYTVTWVRQAPGKGLEWVSSIIGGGVSTYYADSVKGRFTLSRDNSKNILYLQMNSLRAEDTAVYYCARDSRRWLQSAAFDYWGQGTLVTVSS

SEQ ID NO: 8103 - protein, 98 aa, Homo sapiens
EVQLLESGGALVQPGGSLRLSCVGSGLNFSAFMVHWVRQVPGRGLEWLSGIDGSGFSLYYGDSVGGRFTVSRDKSKNTVYLQMHNLRVEDTALYYCAK

SEQ ID NO: 8104 - protein, 124 aa, Homo sapiens
EVQLLESGGALVQPGGSLRLSCVGSGLNFSAFMVHWVRQVPGRGLEWLSGIDGSGFSLYYGDSVGGRFTVSRDKSKNTVYLQMHNLRVEDTALYYCAKTLREGVKSSDIIFDSWGQGTQVAVSS

SEQ ID NO: 8105 - protein, 98 aa, Homo sapiens
EVQLLESGGALVQPGGSLRVSCAASGFVLRSYTMTWVRQAPGKGLEWVSSIIAGGVSTYYADSVKGRFTLSRDNSKSTLYLQMNSLRPEDTAVYYCAK

SEQ ID NO: 8106 - protein, 122 aa, Homo sapiens
EVQLLESGGALVQPGGSLRVSCAASGFVLRSYTMTWVRQAPGKGLEWVSSIIAGGVSTYYADSVKGRFTLSRDNSKSTLYLQMNSLRPEDTAVYYCAKDSRRWLQSAAFDYWGQGTLVTVSS

SEQ ID NO: 8107 - protein, 98 aa, Homo sapiens
EVQLLESGGDFVQPGGSLRLSCAASGFTFSSYAMSWFRQAPGKGLEWVSTISGSGLSTYYADSVKGRFTISRDSSKNTLYLQVNSLRAEDTAVYYCAK

SEQ ID NO: 8108 - protein, 123 aa, Homo sapiens
EVQLLESGGDFVQPGGSLRLSCAASGFTFSSYAMSWFRQAPGKGLEWVSTISGSGLSTYYADSVKGRFTISRDSSKNTLYLQVNSLRAEDTAVYYCAKDRAVSPAMGGYFHDWGQGTLVTVSS

SEQ ID NO: 8109 - protein, 98 aa, Homo sapiens
EVQLLESGGDFVQPGGSLRLSCAVSGFIFSSYAMSWFRQAPGKGLEWVSTISPSGLSTYYTDSVKGRFTISRDSSKNTVYLQVNSLRAEDTAVYYCAK

SEQ ID NO: 8110 - protein, 123 aa, Homo sapiens
EVQLLESGGDFVQPGGSLRLSCAVSGFIFSSYAMSWFRQAPGKGLEWVSTISPSGLSTYYTDSVKGRFTISRDSSKNTVYLQVNSLRAEDTAVYYCAKDRGVSPAMGGYFQDWGQGTLVTVSS

SEQ ID NO: 8111 - protein, 98 aa, Homo sapiens
EVQLLESGGDLVQPGGSLRLSCAASGFSFGNHWLSWVRQAPGKGLEWVAYIKQDGTEKDYVDSVKGRFTISRDNAKNSLYLLMNSLRAEDTAVYYCAR

SEQ ID NO: 8112 - protein, 124 aa, Homo sapiens
EVQLLESGGDLVQPGGSLRLSCAASGFSFGNHWLSWVRQAPGKGLEWVAYIKQDGTEKDYVDSVKGRFTISRDNAKNSLYLLMNSLRAEDTAVYYCARHYFYDKSTHYRHFDSWGQGTLVTVSS

SEQ ID NO: 8113 - protein, 98 aa, Homo sapiens
EVQLLESGGDLVQPGGSLRLSCAASGFTFDTYWMAWVRQAPGKGLEWVSAINAGGGGTYYADSVKGRFTISRDNSKNTLYLQMNSLKAEDTAVYYCAK

SEQ ID NO: 8114 - protein, 127 aa, Homo sapiens
EVQLLESGGDLVQPGGSLRLSCAASGFTFDTYWMAWVRQAPGKGLEWVSAINAGGGGTYYADSVKGRFTISRDNSKNTLYLQMNSLKAEDTAVYYCAKDAGKMLFGLVIIQYYFDSWGQGTLVTVSS

SEQ ID NO: 8115 - protein, 100 aa, Homo sapiens
EVQLLESGGDLVQPGGSLRLSCAASGFTFSNYVMIWVRQAPGKGLEWVSDIRGIRGSVGSTNYEDSVMGRFTISRDNSKNTLYLQMNSLRVEDTAVYYCA

SEQ ID NO: 8116 - protein, 128 aa, Homo sapiens
EVQLLESGGDLVQPGGSLRLSCAASGFTFSNYVMIWVRQAPGKGLEWVSDIRGIRGSVGSTNYEDSVMGRFTISRDNSKNTLYLQMNSLRVEDTAVYYCAKGMSLSVYSGSGMPIDYWGQGTLVTVSS

SEQ ID NO: 8117 - protein, 98 aa, Homo sapiens
EVQLLESGGGFIQPGGTLRLSCAASGFSFSSYGMYWVRQAPGKGLEWVSSISGSGLSAYYADSVKGRFTISRDNSKHTLYLYMNSLRAEDTALYYCAK

SEQ ID NO: 8118 - protein, 123 aa, Homo sapiens
EVQLLESGGGFIQPGGTLRLSCAASGFSFSSYGMYWVRQAPGKGLEWVSSISGSGLSAYYADSVKGRFTISRDNSKHTLYLYMNSLRAEDTALYYCAKEYSTYVPVTGTFDYWGQGTLVTVSS

SEQ ID NO: 8119 - protein, 98 aa, Homo sapiens
EVQLLESGGGFVQPRGSLRLSCAASGFTFSSYAMTWVRQAPGKGLEWVSSLTGSGGDTYYADSVKGRFTISRDNSQNTMYLQMNSLRAEDTAVYYCAK

SEQ ID NO: 8120 - protein, 123 aa, Homo sapiens
EVQLLESGGGFVQPRGSLRLSCAASGFTFSSYAMTWVRQAPGKGLEWVSSLTGSGGDTYYADSVKGRFTISRDNSQNTMYLQMNSLRAEDTAVYYCAKDWRESSCDGDCLNYWGRGTLVTVSS

SEQ ID NO: 8121 - protein, 98 aa, Homo sapiens
EVQLLESGGGLAQPGGSLRLSCAASGFTFSTYAMTWVRQAPGKGLEWVSAISGSGGRTYYADSVRGRFTISRDNSKNTLYLQINTLGAEDTAIYYCAK

SEQ ID NO: 8122 - protein, 124 aa, Homo sapiens
EVQLLESGGGLAQPGGSLRLSCAASGFTFSTYAMTWVRQAPGKGLEWVSAISGSGGRTYYADSVRGRFTISRDNSKNTLYLQINTLGAEDTAIYYCAKTTTYISGSYLSPPEYWGQGTLVSVSS

SEQ ID NO: 8123 - protein, 98 aa, Homo sapiens
EVQLLESGGGLAQPGGSLRLSCVASGFTFRNNVMFWVRQAPGKGLEWVSSISGSGLSAYYADSVKGRFTISRDNSRNTLYMHMNSLGAEDTAVYYCAK

SEQ ID NO: 8124 - protein, 122 aa, Homo sapiens
EVQLLESGGGLAQPGGSLRLSCVASGFTFRNNVMFWVRQAPGKGLEWVSSISGSGLSAYYADSVKGRFTISRDNSRNTLYMHMNSLGAEDTAVYYCAKYGGSFPLGGYMDVWGKGATVTVSS

SEQ ID NO: 8125 - protein, 98 aa, Homo sapiens
EVQLLESGGGLAQPGGSLRLSCVATGFAFSSHGMSWVRQAPGKGLEWVSAIRGGGYSTYYADSVKGRFTVSRDTSKNTLYLQMRSLRADDTAVYFCAK

SEQ ID NO: 8126 - protein, 123 aa, Homo sapiens
EVQLLESGGGLAQPGGSLRLSCVATGFAFSSHGMSWVRQAPGKGLEWVSAIRGGGYSTYYADSVKGRFTVSRDTSKNTLYLQMRSLRADDTAVYFCAKERAWLLPTGGDFDYWGQGTLVTVSS

SEQ ID NO: 8127 - protein, 98 aa, Homo sapiens
EVQLLESGGGLAQPGGSLRLSCVGSGFTFSSYTMNWVRQAPGKGLEWVASISLSGVSMFYGDSVRGRFTISRDNSKNTLYLQMNSLGAEDTAFYFCAK

SEQ ID NO: 8128 - protein, 122 aa, Homo sapiens
EVQLLESGGGLAQPGGSLRLSCVGSGFTFSSYTMNWVRQAPGKGLEWVASISLSGVSMFYGDSVRGRFTISRDNSKNTLYLQMNSLGAEDTAFYFCAKTAEMITTISGFDLWGQGTLVTVSS

SEQ ID NO: 8129 - protein, 98 aa, Homo sapiens
EVQLLESGGGLGQPGGSLRLSCAASGFSFSRFALSWVRQAPGKGLEWVSSISDSGGSTYYAESVQGRFTISRDNSKNTLYLQMNNLRTEDTAVYYCAK

SEQ ID NO: 8130 - protein, 124 aa, Homo sapiens
EVQLLESGGGLGQPGGSLRLSCAASGFSFSRFALSWVRQAPGKGLEWVSSISDSGGSTYYAESVQGRFTISRDNSKNTLYLQMNNLRTEDTAVYYCAKSISMIVVVVTYAFDVWGQGTTVTVSS

SEQ ID NO: 8131 - protein, 98 aa, Homo sapiens
EVQLLESGGGLGQPGGSLRLSCAASGFSFTTYDLSWVRQAPGKGLEWVSAISDSGGSTYYADSVKGRFTISRDNSKNTLYLEMNSLRTEDTAVYYCAK

SEQ ID NO: 8132 - protein, 124 aa, Homo sapiens
EVQLLESGGGLGQPGGSLRLSCAASGFSFTTYDLSWVRQAPGKGLEWVSAISDSGGSTYYADSVKGRFTISRDNSKNTLYLEMNSLRTEDTAVYYCAKSITTIVVVVTYAFDIWGQGTMVTVSS

SEQ ID NO: 8133 - protein, 98 aa, Homo sapiens
EVQLLESGGGLGQPGGSLRLSCAGSGFSFNNYALSWVRQAPGKGLEWVSGINDSGGSTYYADSVKGRFSISRDNSKNTLYLQMNNLRAEDTAVYYCAK

SEQ ID NO: 8134 - protein, 124 aa, Homo sapiens
EVQLLESGGGLGQPGGSLRLSCAGSGFSFNNYALSWVRQAPGKGLEWVSGINDSGGSTYYADSVKGRFSISRDNSKNTLYLQMNNLRAEDTAVYYCAKSISMIVVVVTYAFDIWGQGTMVTVSS

SEQ ID NO: 8135 - protein, 98 aa, Homo sapiens
EVQLLESGGGLIQPGGSLRLSCAASAFTFNKYAMNWVRQAPGKGLEWVSHISGSGLSTYYADSVKGRFTISRDNSKNTLYLQMNSLRAEDTAVYYCAK

SEQ ID NO: 8136 - protein, 123 aa, Homo sapiens
EVQLLESGGGLIQPGGSLRLSCAASAFTFNKYAMNWVRQAPGKGLEWVSHISGSGLSTYYADSVKGRFTISRDNSKNTLYLQMNSLRAEDTAVYYCAKDLAVTPPAQGYLDRWGQGTLVTVSS

SEQ ID NO: 8137 - protein, 98 aa, Homo sapiens
EVQLLESGGGLLHPGGSLRLSCVASGFTFHSYVMTWVRQAPGKGLEWVSSITGSGGSKYYADSVKGRFTISRDNSKNTVFLQMNNLRVEDTAVYYCAK

SEQ ID NO: 8138 - protein, 123 aa, Homo sapiens
EVQLLESGGGLLHPGGSLRLSCVASGFTFHSYVMTWVRQAPGKGLEWVSSITGSGGSKYYADSVKGRFTISRDNSKNTVFLQMNNLRVEDTAVYYCAKDNIPRIPGAGAMDVWGEGTTVTVSS

SEQ ID NO: 8139 - protein, 98 aa, Homo sapiens
EVQLLESGGGLLQPGGSLRLSCAVSGFTFTSYAMSWVRQAPGKGLEWVSSISGSGFSRYYADSVKGRFTISRDNSKNTLYLQMNSLRAEDTAIYYCAK

SEQ ID NO: 8140 - protein, 122 aa, Homo sapiens
EVQLLESGGGLLQPGGSLRLSCAVSGFTFTSYAMSWVRQAPGKGLEWVSSISGSGFSRYYADSVKGRFTISRDNSKNTLYLQMNSLRAEDTAIYYCAKGQSTVPSTGWFDPWGQGTLVTVSS

SEQ ID NO: 8141 - protein, 98 aa, Homo sapiens
EVQLLESGGGLLQPGGSLRLSCTASGFTFSSYAMSWVRQAPGQGLEWVSTISDSGISTYYADSVKGRFTISRDKTKNTLYLQMNSLRAEDTAVYYCAR

SEQ ID NO: 8142 - protein, 124 aa, Homo sapiens
EVQLLESGGGLLQPGGSLRLSCTASGFTFSSYAMSWVRQAPGQGLEWVSTISDSGISTYYADSVKGRFTISRDKTKNTLYLQMNSLRAEDTAVYYCARDRERIQLWFRGAFDLWGQGTVVTVSS

SEQ ID NO: 8143 - protein, 98 aa, Homo sapiens
EVQLLESGGGLLQPGGSLRLSCVASGFTFSNYAMSWVRQAPGKALEWVSAIRSGGDYAYHADSVKGRFTISRDNSENTLYLQMNSLRADDTAVYYCAR

SEQ ID NO: 8144 - protein, 120 aa, Homo sapiens
EVQLLESGGGLLQPGGSLRLSCVASGFTFSNYAMSWVRQAPGKALEWVSAIRSGGDYAYHADSVKGRFTISRDNSENTLYLQMNSLRADDTAVYYCARDWRDDSGGIEYWGQGTLVTVSS

SEQ ID NO: 8145 - protein, 96 aa, Homo sapiens
EVQLLESGGGLVEPGGSLRLSCAASGFTFSKSGMSWVRQAPGKGLEWVSFISATGGSTYYVDSVKGRFTIVRDSSKNTLYLQLNRLRVEDTAVYYC

SEQ ID NO: 8146 - protein, 125 aa, Homo sapiens
EVQLLESGGGLVEPGGSLRLSCAASGFTFSKSGMSWVRQAPGKGLEWVSFISATGGSTYYVDSVKGRFTIVRDSSKNTLYLQLNRLRVEDTAVYYCWAATWIQPWLRPRDFFDYWGQGTLVTVSS

SEQ ID NO: 8147 - protein, 98 aa, Homo sapiens
EVQLLESGGGLVHPGGSLRLSCAVSGFTLTNYAINWVRQAPGKGLEWVSYISATGGSTYYADSVKGRFTISRDTSKNTLFLQMNSLRAEDTALYYCAK

SEQ ID NO: 8148 - protein, 124 aa, Homo sapiens
EVQLLESGGGLVHPGGSLRLSCAVSGFTLTNYAINWVRQAPGKGLEWVSYISATGGSTYYADSVKGRFTISRDTSKNTLFLQMNSLRAEDTALYYCAKDAIAGRVWLQGAFDSWGQGTLVTVSS

SEQ ID NO: 8149 - protein, 98 aa, Homo sapiens
EVQLLESGGGLVHRGGSLRLSCSASGFTFSSYAMSWVRQAPGKGLEWVASISGSGISKYYADSVKGRFTISRDNSKYTLYVQMNGLRGEDTATYYCAK

SEQ ID NO: 8150 - protein, 121 aa, Homo sapiens
EVQLLESGGGLVHRGGSLRLSCSASGFTFSSYAMSWVRQAPGKGLEWVASISGSGISKYYADSVKGRFTISRDNSKYTLYVQMNGLRGEDTATYYCAKGRGHPTEGWFDPWGQGTLVTVSS

SEQ ID NO: 8151 - protein, 98 aa, Homo sapiens
EVQLLESGGGLVKPGGSLRLSCAASGFSFDNYDMNWVRQAPGKGLEWVSSISSSSGYIFYADSVKGRFTISRDNAKNSLYLQMNSLRAEDTAVYYCAG

SEQ ID NO: 8152 - protein, 116 aa, Homo sapiens
EVQLLESGGGLVKPGGSLRLSCAASGFSFDNYDMNWVRQAPGKGLEWVSSISSSSGYIFYADSVKGRFTISRDNAKNSLYLQMNSLRAEDTAVYYCAGGGTYFDYWGQGTLVTVSS

SEQ ID NO: 8153 - protein, 97 aa, Homo sapiens
EVQLLESGGGLVKPGGSLRLSCAASGFTFRNYAMTWVRQAPGKGLEWVSSFTGTMSTYYADSVKGRFTISRDNVKNTLYLQLNSLRAEDTAIYFCAK

SEQ ID NO: 8154 - protein, 124 aa, Homo sapiens
EVQLLESGGGLVKPGGSLRLSCAASGFTFRNYAMTWVRQAPGKGLEWVSSFTGTMSTYYADSVKGRFTISRDNVKNTLYLQLNSLRAEDTAIYFCAKLGSPGVSTNNYGYFDSWGQGTPVTVSS

SEQ ID NO: 8155 - protein, 98 aa, Homo sapiens
EVQLLESGGGLVQPGASLRLSCAASGFSFKDYALSWVRQAPGKGLEWVSHISGSGLSTYYADSVKGRFTISRDNSKNTVYLQMNSLRAEDTAVYFCAK

SEQ ID NO: 8156 - protein, 123 aa, Homo sapiens
EVQLLESGGGLVQPGASLRLSCAASGFSFKDYALSWVRQAPGKGLEWVSHISGSGLSTYYADSVKGRFTISRDNSKNTVYLQMNSLRAEDTAVYFCAKDRVVGRPWEYSLDFWGQGTLVTVSS

SEQ ID NO: 8157 - protein, 98 aa, Homo sapiens
EVQLLESGGGLVQPGDSLKLSCVGSGLTFGSTTMSWVRQAPGKGLEWVSIISDNGGKTYYADSVKGRFTISRDNSKNTLYLQMNSLRGEDTAIYYCAK

SEQ ID NO: 8158 - protein, 124 aa, Homo sapiens
EVQLLESGGGLVQPGDSLKLSCVGSGLTFGSTTMSWVRQAPGKGLEWVSIISDNGGKTYYADSVKGRFTISRDNSKNTLYLQMNSLRGEDTAIYYCAKGHSWDGSTYYRAFDCWGQGTLVIVSS

SEQ ID NO: 8159 - protein, 98 aa, Homo sapiens
EVQLLESGGGLVQPGESLRLSCAASGFTFSSYNMKWVRQAPGKGLEWVSYISSSSATIYYAGSVRGRFTISRDNAKNSLYLQLNSLRAEDTAVYYCAR

SEQ ID NO: 8160 - protein, 121 aa, Homo sapiens
EVQLLESGGGLVQPGESLRLSCAASGFTFSSYNMKWVRQAPGKGLEWVSYISSSSATIYYAGSVRGRFTISRDNAKNSLYLQLNSLRAEDTAVYYCARDLVGWDLVNQDNWGQGTLVTVSS

SEQ ID NO: 8161 - protein, 97 aa, Homo sapiens
EVQLLESGGGLVQPGGFLRLSCSASGFTFRSYIMAWVRQAPGKGLEWVSSISGSSLSTYYVDAVKGRFTISRDNSKNTLYLQMTSLRVEDTAVYYCA

SEQ ID NO: 8162 - protein, 122 aa, Homo sapiens
EVQLLESGGGLVQPGGFLRLSCSASGFTFRSYIMAWVRQAPGKGLEWVSSISGSSLSTYYVDAVKGRFTISRDNSKNTLYLQMTSLRVEDTAVYYCATLGVNPALSGSLDSWGQGTLVTVSS

SEQ ID NO: 8163 - protein, 95 aa, Homo sapiens
EVQLLESGGGLVQPGGSLRLACAASGFTFSDYAMSWVRQAPGKGLEWISVIRASGESRDYGDSVKGRFTTSRDNSKNMLYLQIRSLRAEDTAVYF

SEQ ID NO: 8164 - protein, 126 aa, Homo sapiens
EVQLLESGGGLVQPGGSLRLACAASGFTFSDYAMSWVRQAPGKGLEWISVIRASGESRDYGDSVKGRFTTSRDNSKNMLYLQIRSLRAEDTAVYFCVSTGWTDGGSWVYHHNMDVWGKGTTVIVSS

SEQ ID NO: 8165 - protein, 95 aa, Homo sapiens
EVQLLESGGGLVQPGGSLRLSCAAFGFTFSSDAMTWVRQAPGKGLEWVSTFSGGFSYYTDSVKGRFTVSRDNSKNTLFLQMNSLRAGDTAIYYCA

SEQ ID NO: 8166 - protein, 114 aa, Homo sapiens
EVQLLESGGGLVQPGGSLRLSCAAFGFTFSSDAMTWVRQAPGKGLEWVSTFSGGFSYYTDSVKGRFTVSRDNSKNTLFLQMNSLRAGDTAIYYCAVGDTAMVIWGQGTLVTVSS

SEQ ID NO: 8167 - protein, 98 aa, Homo sapiens
EVQLLESGGGLVQPGGSLRLSCAASEFTFSNYAMTWVRQAPGKGLEWVASISNSGFSRYFADSVKGRFTISRDNSKNTLYLQMNSLRAEDTAVYYCAQ

SEQ ID NO: 8168 - protein, 123 aa, Homo sapiens
EVQLLESGGGLVQPGGSLRLSCAASEFTFSNYAMTWVRQAPGKGLEWVASISNSGFSRYFADSVKGRFTISRDNSKNTLYLQMNSLRAEDTAVYYCAQDTPFLSRTAEYFRHWGQGTLVAVSS

SEQ ID NO: 8169 - protein, 98 aa, Homo sapiens
EVQLLESGGGLVQPGGSLRLSCAASGFAFPIYAMSWVRQAPGKGLEWVSAIRGSGTETFYTDSVKGRFTISRDNSKNTLYLQMNSLRAEDTALYYCAK

SEQ ID NO: 8170 - protein, 123 aa, Homo sapiens
EVQLLESGGGLVQPGGSLRLSCAASGFAFPIYAMSWVRQAPGKGLEWVSAIRGSGTETFYTDSVKGRFTISRDNSKNTLYLQMNSLRAEDTALYYCAKCAGGGDPKAGTFDMWGQGTMVTVSS

SEQ ID NO: 8171 - protein, 98 aa, Homo sapiens
EVQLLESGGGLVQPGGSLRLSCAASGFIFNNYAMSWVRQAPGKGLEWVSSFAGDTGNIYYADSVKGRFTISRDNPKNTVFLQANSLRVDDTAIYYCAK

SEQ ID NO: 8172 - protein, 125 aa, Homo sapiens
EVQLLESGGGLVQPGGSLRLSCAASGFIFNNYAMSWVRQAPGKGLEWVSSFAGDTGNIYYADSVKGRFTISRDNPKNTVFLQANSLRVDDTAIYYCAKDWGPKDSSSYDDGLDIWGQGTMVTVFS

SEQ ID NO: 8173 - protein, 98 aa, Homo sapiens
EVQLLESGGGLVQPGGSLRLSCAASGFIFTNYAMSWVRQAPGKGLEWVSSIRRNGDKAYYADSVKGRSTISRDNSKNTLNLQVNSLRVEDTAVYYCVR

SEQ ID NO: 8174 - protein, 120 aa, Homo sapiens
EVQLLESGGGLVQPGGSLRLSCAASGFIFTNYAMSWVRQAPGKGLEWVSSIRRNGDKAYYADSVKGRSTISRDNSKNTLNLQVNSLRVEDTAVYYCVRDWRGDEDGIDYWGRGTLVTVSS

SEQ ID NO: 8175 - protein, 98 aa, Homo sapiens
EVQLLESGGGLVQPGGSLRLSCAASGFMFSTYSMNWVRQCPGKGLEWVSVIAGSGDSTSYAGSVKGRFTISRDNSKNTLYLQMNSLRAEDTALYYCAK

SEQ ID NO: 8176 - protein, 125 aa, Homo sapiens
EVQLLESGGGLVQPGGSLRLSCAASGFMFSTYSMNWVRQCPGKGLEWVSVIAGSGDSTSYAGSVKGRFTISRDNSKNTLYLQMNSLRAEDTALYYCAKGQLWDKSVTFYRPLESWGQGTLVTVSS

SEQ ID NO: 8177 - protein, 97 aa, Homo sapiens
EVQLLESGGGLVQPGGSLRLSCAASGFNFNTYVMSWVRQAPGKGLEWVSSLSGSGGSAYYADSVKGRFTISKDKSKNTLFLQLNSLRAEDTAVYYCA

SEQ ID NO: 8178 - protein, 122 aa, Homo sapiens
EVQLLESGGGLVQPGGSLRLSCAASGFNFNTYVMSWVRQAPGKGLEWVSSLSGSGGSAYYADSVKGRFTISKDKSKNTLFLQLNSLRAEDTAVYYCAKHTAKFPPDPDAFDVWGQGTLVTVS

SEQ ID NO: 8179 - protein, 98 aa, Homo sapiens
EVQLLESGGGLVQPGGSLRLSCAASGFSFNTFGMSWVRQAPGKGLQWVSYISATGGSTYYEDSVKGRFTISRDNSKNTLYLQMNRLRADDTAIYYCAK

SEQ ID NO: 8180 - protein, 123 aa, Homo sapiens
EVQLLESGGGLVQPGGSLRLSCAASGFSFNTFGMSWVRQAPGKGLQWVSYISATGGSTYYEDSVKGRFTISRDNSKNTLYLQMNRLRADDTAIYYCAKFQSTYIPVAGNFDYWGQGTLVTVSS

SEQ ID NO: 8181 - protein, 98 aa, Homo sapiens
EVQLLESGGGLVQPGGSLRLSCAASGFSFSAYAIHWVRQVPGKGLEWVSSISSTGISTYYADSVKGRFTISRDNSKNTVYLQLNSLRAGDTAVYACAK

SEQ ID NO: 8182 - protein, 123 aa, Homo sapiens
EVQLLESGGGLVQPGGSLRLSCAASGFSFSAYAIHWVRQVPGKGLEWVSSISSTGISTYYADSVKGRFTISRDNSKNTVYLQLNSLRAGDTAVYACAKDRVVPTALHGYLDSWGQGTLVTVSS

SEQ ID NO: 8183 - protein, 98 aa, Homo sapiens
EVQLLESGGGLVQPGGSLRLSCAASGFSFSNYGMNWVRQAPGKGLEWVATISASGGSTYYADSVRGRFTISRDRSKNTLFLQMNSLRAEDTAVYYCAK

SEQ ID NO: 8184 - protein, 123 aa, Homo sapiens
EVQLLESGGGLVQPGGSLRLSCAASGFSFSNYGMNWVRQAPGKGLEWVATISASGGSTYYADSVRGRFTISRDRSKNTLFLQMNSLRAEDTAVYYCAKDLRDWVAVAGYLDFWGQGTLVTVSS

SEQ ID NO: 8185 - protein, 98 aa, Homo sapiens
EVQLLESGGGLVQPGGSLRLSCAASGFSFSSNAMYWVRQAPGKGLEWVSFISASALSKYYADSVKGRFTISRDNSKNTLYVQMNSLRVEDTAVYYCAR

SEQ ID NO: 8186 - protein, 122 aa, Homo sapiens
EVQLLESGGGLVQPGGSLRLSCAASGFSFSSNAMYWVRQAPGKGLEWVSFISASALSKYYADSVKGRFTISRDNSKNTLYVQMNSLRVEDTAVYYCAREGGSFPLGGYMDVWGKGTTVTVSS

SEQ ID NO: 8187 - protein, 98 aa, Homo sapiens
EVQLLESGGGLVQPGGSLRLSCAASGFSFSTFGMSWVRQAPGKGLQWVSYISATGGSTYYEDSVKGRFTIARDNSKNTLYLQMKSLRAEDTAVYYCAK

SEQ ID NO: 8188 - protein, 123 aa, Homo sapiens
EVQLLESGGGLVQPGGSLRLSCAASGFSFSTFGMSWVRQAPGKGLQWVSYISATGGSTYYEDSVKGRFTIARDNSKNTLYLQMKSLRAEDTAVYYCAKSQSRSIPVAGNFDYWGQGTLVTVSS

SEQ ID NO: 8189 - protein, 98 aa, Homo sapiens
EVQLLESGGGLVQPGGSLRLSCAASGFSFSTYAMSWVRQAPGKGLEWVSSIRGSGISTYYADSVKGRCTIARDNSKNTLYLRMNSLRAEDTAVYYCAK

SEQ ID NO: 8190 - protein, 123 aa, Homo sapiens
EVQLLESGGGLVQPGGSLRLSCAASGFSFSTYAMSWVRQAPGKGLEWVSSIRGSGISTYYADSVKGRCTIARDNSKNTLYLRMNSLRAEDTAVYYCAKDTSGSPPREGYFDYWGQGTLVTVSS

SEQ ID NO: 8191 - protein, 98 aa, Homo sapiens
EVQLLESGGGLVQPGGSLRLSCAASGFSFSVYAMHWVRQVPGKGLEWVSSISGSGGSTYYADSVKGRFTISRDNSKNTLYLQLNSLSAGDTAVYSCAK

SEQ ID NO: 8192 - protein, 123 aa, Homo sapiens
EVQLLESGGGLVQPGGSLRLSCAASGFSFSVYAMHWVRQVPGKGLEWVSSISGSGGSTYYADSVKGRFTISRDNSKNTLYLQLNSLSAGDTAVYSCAKDRVVPTPLHGYLDSWGQGTLVTVSS

SEQ ID NO: 8193 - protein, 97 aa, Homo sapiens
EVQLLESGGGLVQPGGSLRLSCAASGFSLNTYAMAWVRQAPGMGLEWVSFISGSGLSTYYADSVKGRFTISRDKSKDTVSLQMRSLRAEDTAVYYCA

SEQ ID NO: 8194 - protein, 125 aa, Homo sapiens
EVQLLESGGGLVQPGGSLRLSCAASGFSLNTYAMAWVRQAPGMGLEWVSFISGSGLSTYYADSVKGRFTISRDKSKDTVSLQMRSLRAEDTAVYYCAKILGSGNYPPTQGYFDSWGQGTLVTVSS

SEQ ID NO: 8195 - protein, 98 aa, Homo sapiens
EVQLLESGGGLVQPGGSLRLSCAASGFTFDTYWMAWVRQAPGKGLEYVANIKYDGSEKYYVGSVKGRFTVSRDNAKNSLYLQMNSLTSEDTALYYCVR

SEQ ID NO: 8196 - protein, 119 aa, Homo sapiens
EVQLLESGGGLVQPGGSLRLSCAASGFTFDTYWMAWVRQAPGKGLEYVANIKYDGSEKYYVGSVKGRFTVSRDNAKNSLYLQMNSLTSEDTALYYCVRVIGGRYHADNWGRGTLVTVSS

SEQ ID NO: 8197 - protein, 99 aa, Homo sapiens
EVQLLESGGGLVQPGGSLRLSCAASGFTFGAYAMGWVRQAPGKGLEWVSGFSSGSGSSTYYVDSVKGRFTISRDKSKSTLFLQMNSLRVEDTAVYYCAK

SEQ ID NO: 8198 - protein, 124 aa, Homo sapiens
EVQLLESGGGLVQPGGSLRLSCAASGFTFGAYAMGWVRQAPGKGLEWVSGFSSGSGSSTYYVDSVKGRFTISRDKSKSTLFLQMNSLRVEDTAVYYCAKDRGQMPYSSGSFDYWGQGTLVTVSS

SEQ ID NO: 8199 - protein, 98 aa, Homo sapiens
EVQLLESGGGLVQPGGSLRLSCAASGFTFGSYAMTWVRQAPGKGLEWVSTITGSGISTYYADSVKGRFTISRDNSKNTLNLQMNSLRAEDTAVYYCAK

SEQ ID NO: 8200 - protein, 123 aa, Homo sapiens
EVQLLESGGGLVQPGGSLRLSCAASGFTFGSYAMTWVRQAPGKGLEWVSTITGSGISTYYADSVKGRFTISRDNSKNTLNLQMNSLRAEDTAVYYCAKAAAPHIVVAGVFDYWGQGTMVTVSS

SEQ ID NO: 8201 - protein, 97 aa, Homo sapiens
EVQLLESGGGLVQPGGSLRLSCAASGFTFINYAMDWVRQAPGRGLEWVSGLSGSGASTYYADSVKGRFTISRDNSKNTLYLQMKSLRGEDTAVYYCA

SEQ ID NO: 8202 - protein, 121 aa, Homo sapiens
EVQLLESGGGLVQPGGSLRLSCAASGFTFINYAMDWVRQAPGRGLEWVSGLSGSGASTYYADSVKGRFTISRDNSKNTLYLQMKSLRGEDTAVYYCAKGSSRSGSYYFDSWGQGTLVSVSS

SEQ ID NO: 8203 - protein, 98 aa, Homo sapiens
EVQLLESGGGLVQPGGSLRLSCAASGFTFNNYVMTWVRQAPGKGLEWVASISGRSDATYYADSVKGRFTVSRDNSKSTSYLQMSSLRAEDTAVYYCAK

SEQ ID NO: 8204 - protein, 123 aa, Homo sapiens
EVQLLESGGGLVQPGGSLRLSCAASGFTFNNYVMTWVRQAPGKGLEWVASISGRSDATYYADSVKGRFTVSRDNSKSTSYLQMSSLRAEDTAVYYCAKDWKGNQCDGDCLSHWGQGTLVTVSS

SEQ ID NO: 8205 - protein, 96 aa, Homo sapiens
EVQLLESGGGLVQPGGSLRLSCAASGFTFNTYAMSWVRQAPGKGLEWVSTISGNGDTTYYADSVKGRFTISRDNSKNTLYVQMNSLRAEDTAVYYC

SEQ ID NO: 8206 - protein, 119 aa, Homo sapiens
EVQLLESGGGLVQPGGSLRLSCAASGFTFNTYAMSWVRQAPGKGLEWVSTISGNGDTTYYADSVKGRFTISRDNSKNTLYVQMNSLRAEDTAVYYCVAAFYLLYYFDFWGQGTLVTVSS

SEQ ID NO: 8207 - protein, 98 aa, Homo sapiens
EVQLLESGGGLVQPGGSLRLSCAASGFTFRDYGMTWVRQAPGKGPEWVSTISNSGASTYYADSVRGRFTISRDNSKNTLYLQMNRLRAEDTAVYYCAQ

SEQ ID NO: 8208 - protein, 117 aa, Homo sapiens
EVQLLESGGGLVQPGGSLRLSCAASGFTFRDYGMTWVRQAPGKGPEWVSTISNSGASTYYADSVRGRFTISRDNSKNTLYLQMNRLRAEDTAVYYCAQSLYSDTTAWGPGTMVTVSS

SEQ ID NO: 8209 - protein, 98 aa, Homo sapiens
EVQLLESGGGLVQPGGSLRLSCAASGFTFSGYVMSWVRQAPGKGLEWVSSISGSGGSRYYADSVKGRFTIARDNTKNKLHLQMNSLRGEDTAVYYCAK

SEQ ID NO: 8210 - protein, 123 aa, Homo sapiens
EVQLLESGGGLVQPGGSLRLSCAASGFTFSGYVMSWVRQAPGKGLEWVSSISGSGGSRYYADSVKGRFTIARDNTKNKLHLQMNSLRGEDTAVYYCAKDLYTSIPGAGRMGYWGQGTLVTVSS

SEQ ID NO: 8211 - protein, 97 aa, Homo sapiens
EVQLLESGGGLVQPGGSLRLSCAASGFTFSHNAMSWVRQAPGKGLEWVALITGDGGVTYYPDSVKGRFTISRDNSKGTLYLQMNTLRAEDTALYYCA

SEQ ID NO: 8212 - protein, 122 aa, Homo sapiens
EVQLLESGGGLVQPGGSLRLSCAASGFTFSHNAMSWVRQAPGKGLEWVALITGDGGVTYYPDSVKGRFTISRDNSKGTLYLQMNTLRAEDTALYYCAPSHGSGYGTDYLGYWGQGTLVTVSS

SEQ ID NO: 8213 - protein, 98 aa, Homo sapiens
EVQLLESGGGLVQPGGSLRLSCAASGFTFSNYAMNWVRQAPGKGLEWVSAISGSGGTTSYADSVKGRFTISRDNSKNTLYLQMNSLRAEDTAVYYCAK

SEQ ID NO: 8214 - protein, 123 aa, Homo sapiens
EVQLLESGGGLVQPGGSLRLSCAASGFTFSNYAMNWVRQAPGKGLEWVSAISGSGGTTSYADSVKGRFTISRDNSKNTLYLQMNSLRAEDTAVYYCAKGDPLRAVVTPPFDSWGQGTLVTVSS

SEQ ID NO: 8215 - protein, 97 aa, Homo sapiens
EVQLLESGGGLVQPGGSLRLSCAASGFTFSNYAMNWVRQAPGKGLEWVSTVSSSGGSTYYADSVKGRFTISRDSSKSTLYLQMKSLRAEDTAVYYCA

SEQ ID NO: 8216 - protein, 124 aa, Homo sapiens
EVQLLESGGGLVQPGGSLRLSCAASGFTFSNYAMNWVRQAPGKGLEWVSTVSSSGGSTYYADSVKGRFTISRDSSKSTLYLQMKSLRAEDTAVYYCARDSRPYYPPSGGTFDSWGQGTLVTVSS

SEQ ID NO: 8217 - protein, 97 aa, Homo sapiens
EVQLLESGGGLVQPGGSLRLSCAASGFTFSNYAMSWVRQAPGKGLEWVSGIRGNGGSTYYADSVKGRFTISRDNSKNTLYLQMNSLRAEDTAVYYCA

SEQ ID NO: 8218 - protein, 118 aa, Homo sapiens
EVQLLESGGGLVQPGGSLRLSCAASGFTFSNYAMSWVRQAPGKGLEWVSGIRGNGGSTYYADSVKGRFTISRDNSKNTLYLQMNSLRAEDTAVYYCARRDYYYGMDVWGQGTTVTVSS

SEQ ID NO: 8219 - protein, 97 aa, Homo sapiens
EVQLLESGGGLVQPGGSLRLSCAASGFTFSNYAMTWVRQAPGKGLEWVSAVSGSGGSTYYADSVKGRFTISRDNSKNTLYLQMNSLRAEDTAVYYCA

SEQ ID NO: 8220 - protein, 124 aa, Homo sapiens
EVQLLESGGGLVQPGGSLRLSCAASGFTFSNYAMTWVRQAPGKGLEWVSAVSGSGGSTYYADSVKGRFTISRDNSKNTLYLQMNSLRAEDTAVYYCASPGSLRELSLYGRIAYWGQGTLVTVSS

SEQ ID NO: 8221 - protein, 98 aa, Homo sapiens
EVQLLESGGGLVQPGGSLRLSCAASGFTFSNYAMTWVRRAPGKGLEWVSIISGSGVSTYYADSVKGRFTISRDNSKNTLYLQVNSLRAEDTAVYYCAK

SEQ ID NO: 8222 - protein, 122 aa, Homo sapiens
EVQLLESGGGLVQPGGSLRLSCAASGFTFSNYAMTWVRRAPGKGLEWVSIISGSGVSTYYADSVKGRFTISRDNSKNTLYLQVNSLRAEDTAVYYCAKAPGQYFDWLYFDYWGQGTLVTVSS

SEQ ID NO: 8223 - protein, 98 aa, Homo sapiens
EVQLLESGGGLVQPGGSLRLSCAASGFTFSNYFMTWVRQAPGKGLEWVSSISGSAGSAYYADSVKGRFTISRDTSKNTLYLQMKSLRGEDTAVYYCAK

SEQ ID NO: 8224 - protein, 123 aa, Homo sapiens
EVQLLESGGGLVQPGGSLRLSCAASGFTFSNYFMTWVRQAPGKGLEWVSSISGSAGSAYYADSVKGRFTISRDTSKNTLYLQMKSLRGEDTAVYYCAKDLNRGIPTAGYLDSWGQGTLVTVSS

SEQ ID NO: 8225 - protein, 98 aa, Homo sapiens
EVQLLESGGGLVQPGGSLRLSCAASGFTFSRHAMTWVRQAPGKGLEWVSGISGSGGSRYYADSVKGRFTISRDNSKNTLYLQMNSLRAEDTAVYYCAK

SEQ ID NO: 8226 - protein, 123 aa, Homo sapiens
EVQLLESGGGLVQPGGSLRLSCAASGFTFSRHAMTWVRQAPGKGLEWVSGISGSGGSRYYADSVKGRFTISRDNSKNTLYLQMNSLRAEDTAVYYCAKDRPPRVVLIGVLGSWGQGTQVTVSS

SEQ ID NO: 8227 - protein, 98 aa, Homo sapiens
EVQLLESGGGLVQPGGSLRLSCAASGFTFSRYAMKWVRQAPGKGLEWVSAISGSGISTYYADSVKGRFTISRDNSKNTLFLQMNSLRAEDTAVYYCAK

SEQ ID NO: 8228 - protein, 125 aa, Homo sapiens
EVQLLESGGGLVQPGGSLRLSCAASGFTFSRYAMKWVRQAPGKGLEWVSAISGSGISTYYADSVKGRFTISRDNSKNTLFLQMNSLRAEDTAVYYCAKDLEFDNVVAVAGLIGYWGPGILVTVSS

SEQ ID NO: 8229 - protein, 98 aa, Homo sapiens
EVQLLESGGGLVQPGGSLRLSCAASGFTFSSSAMSWVRQAPGKGLEWVSAITGSGGSKYYGDSVKGRFTISRDISKKTLYLQMNSLRAEDTATYYCAK

SEQ ID NO: 8230 - protein, 123 aa, Homo sapiens
EVQLLESGGGLVQPGGSLRLSCAASGFTFSSSAMSWVRQAPGKGLEWVSAITGSGGSKYYGDSVKGRFTISRDISKKTLYLQMNSLRAEDTATYYCAKDYSSYVPSGGYFDYWGQGTLVTVSS

SEQ ID NO: 8231 - protein, 98 aa, Homo sapiens
EVQLLESGGGLVQPGGSLRLSCAASGFTFSSYAMMWVRQAPGKGLEWVSSISGSGLSTYYADSVKGRFTISRDNSKNMLYLQMNTLRAEDTAVYYCAK

SEQ ID NO: 8232 - protein, 124 aa, Homo sapiens
EVQLLESGGGLVQPGGSLRLSCAASGFTFSSYAMMWVRQAPGKGLEWVSSISGSGLSTYYADSVKGRFTISRDNSKNMLYLQMNTLRAEDTAVYYCAKDWIPSRPALGGYMDVWGKGTTVTVSS

SEQ ID NO: 8233 - protein, 98 aa, Homo sapiens
EVQLLESGGGLVQPGGSLRLSCAASGFTFSSYAMSWVRPAPGKGLEWVSAISGSGISTYYADSVKGRFTISRDNSKNTLFLQMNSLRAEDTAVYYCAK

SEQ ID NO: 8234 - protein, 122 aa, Homo sapiens
EVQLLESGGGLVQPGGSLRLSCAASGFTFSSYAMSWVRPAPGKGLEWVSAISGSGISTYYADSVKGRFTISRDNSKNTLFLQMNSLRAEDTAVYYCAKDLGDYYASGSFDFWGQGTLVTVSS

SEQ ID NO: 8235 - protein, 98 aa, Homo sapiens
EVQLLESGGGLVQPGGSLRLSCAASGFTFSSYAMSWVRQAPGKGLEWVSAISDTGSTTYYADSVKGRFTISRDSSKNTLYLQMNSLRAEDTAVYYCAK

SEQ ID NO: 8236 - protein, 121 aa, Homo sapiens
EVQLLESGGGLVQPGGSLRLSCAASGFTFSSYAMSWVRQAPGKGLEWVSAISDTGSTTYYADSVKGRFTISRDSSKNTLYLQMNSLRAEDTAVYYCAKLGGVSARNPTDYWGQGTLVTVSS

SEQ ID NO: 8237 - protein, 97 aa, Homo sapiens
EVQLLESGGGLVQPGGSLRLSCAASGFTFSSYAMSWVRQAPGKGLEWVSAISGSGGSTYYADSVKGRFTISRDNSKNTLYLQMNSLRAEDTAVYYCA

SEQ ID NO: 8238 - protein, 98 aa, Homo sapiens
EVQLLESGGGLVQPGGSLRLSCAASGFTFSSYAMSWVRQAPGKGLEWVSAISGSGGSTYYADSVKGRFTISRDNSKNTLYLQMNSLRAEDTAVYYCAK

SEQ ID NO: 8239 - protein, 121 aa, Homo sapiens
EVQLLESGGGLVQPGGSLRLSCAASGFTFSSYAMSWVRQAPGKGLEWVSAISGSGGSTYYADSVKGRFTISRDNSKNTLYLQMNSLRAEDTAVYYCAKAEGPMVRSANSYWGQGTLVTVSS

SEQ ID NO: 8240 - protein, 126 aa, Homo sapiens
EVQLLESGGGLVQPGGSLRLSCAASGFTFSSYAMSWVRQAPGKGLEWVSAISGSGGSTYYADSVKGRFTISRDNSKNTLYLQMNSLRAEDTAVYYCAKDGATVNGAPAPLNWFDPWGQGTLVTVSS

SEQ ID NO: 8241 - protein, 117 aa, Homo sapiens
EVQLLESGGGLVQPGGSLRLSCAASGFTFSSYAMSWVRQAPGKGLEWVSAISGSGGSTYYADSVKGRFTISRDNSKNTLYLQMNSLRAEDTAVYYCAKDGILSYDYWGQGTLVTVSS

SEQ ID NO: 8242 - protein, 129 aa, Homo sapiens
EVQLLESGGGLVQPGGSLRLSCAASGFTFSSYAMSWVRQAPGKGLEWVSAISGSGGSTYYADSVKGRFTISRDNSKNTLYLQMNSLRAEDTAVYYCAKDLGGPNYYDSSGYLSYYFDYWGQGTLVTVSS

SEQ ID NO: 8243 - protein, 124 aa, Homo sapiens
EVQLLESGGGLVQPGGSLRLSCAASGFTFSSYAMSWVRQAPGKGLEWVSAISGSGGSTYYADSVKGRFTISRDNSKNTLYLQMNSLRAEDTAVYYCAKDRQIYYGPPRYYFDYWGQGTLVTVSS

SEQ ID NO: 8244 - protein, 122 aa, Homo sapiens
EVQLLESGGGLVQPGGSLRLSCAASGFTFSSYAMSWVRQAPGKGLEWVSAISGSGGSTYYADSVKGRFTISRDNSKNTLYLQMNSLRAEDTAVYYCAKDYVVVTAVHAFDIWGQGTMVTVSS

SEQ ID NO: 8245 - protein, 120 aa, Homo sapiens
EVQLLESGGGLVQPGGSLRLSCAASGFTFSSYAMSWVRQAPGKGLEWVSAISGSGGSTYYADSVKGRFTISRDNSKNTLYLQMNSLRAEDTAVYYCAKGGDVNTMAQDYWGQGTLVTVSS

SEQ ID NO: 8246 - protein, 126 aa, Homo sapiens
EVQLLESGGGLVQPGGSLRLSCAASGFTFSSYAMSWVRQAPGKGLEWVSAISGSGGSTYYADSVKGRFTISRDNSKNTLYLQMNSLRAEDTAVYYCAKLGYCSSTSCSAGAQFDYWGQGTLVTVSS

SEQ ID NO: 8247 - protein, 127 aa, Homo sapiens
EVQLLESGGGLVQPGGSLRLSCAASGFTFSSYAMSWVRQAPGKGLEWVSAISGSGGSTYYADSVKGRFTISRDNSKNTLYLQMNSLRAEDTAVYYCAKPFGELLSDEEYYYYGMDVWGQGTTVTVSS

SEQ ID NO: 8248 - protein, 117 aa, Homo sapiens
EVQLLESGGGLVQPGGSLRLSCAASGFTFSSYAMSWVRQAPGKGLEWVSAISGSGGSTYYADSVKGRFTISRDNSKNTLYLQMNSLRAEDTAVYYCAKRIRGVFDYWGQGTLVTVSS

SEQ ID NO: 8249 - protein, 120 aa, Homo sapiens
EVQLLESGGGLVQPGGSLRLSCAASGFTFSSYAMSWVRQAPGKGLEWVSAISGSGGSTYYADSVKGRFTISRDNSKNTLYLQMNSLRAEDTAVYYCAKSPWNDVRSLDYWGQGTLVTVSS

SEQ ID NO: 8250 - protein, 121 aa, Homo sapiens
EVQLLESGGGLVQPGGSLRLSCAASGFTFSSYAMSWVRQAPGKGLEWVSAISGSGGSTYYADSVKGRFTISRDNSKNTLYLQMNSLRAEDTAVYYCAKVGGYSYAGAFDIWGQGTMVTVSS

SEQ ID NO: 8251 - protein, 118 aa, Homo sapiens
EVQLLESGGGLVQPGGSLRLSCAASGFTFSSYAMSWVRQAPGKGLEWVSAISGSGGSTYYADSVKGRFTISRDNSKNTLYLQMNSLRAEDTAVYYCAKVMVRGVITYWGQGTLVTVSS

SEQ ID NO: 8252 - protein, 126 aa, Homo sapiens
EVQLLESGGGLVQPGGSLRLSCAASGFTFSSYAMSWVRQAPGKGLEWVSAISGSGGSTYYADSVKGRFTISRDNSKNTLYLQMNSLRAEDTAVYYCAKWGGGLKQLVLVGDAFDIWGQGTMVTVSS

SEQ ID NO: 8253 - protein, 98 aa, Homo sapiens
EVQLLESGGGLVQPGGSLRLSCAASGFTFSSYAMSWVRQAPGKGLEWVSAISGSGISTYYADSVKGRFTISRDTSRSTLYLQMSTLRAEDTAVYYCAK

SEQ ID NO: 8254 - protein, 123 aa, Homo sapiens
EVQLLESGGGLVQPGGSLRLSCAASGFTFSSYAMSWVRQAPGKGLEWVSAISGSGISTYYADSVKGRFTISRDTSRSTLYLQMSTLRAEDTAVYYCAKDYSRTIPLAGFLDQWGQGTLVTVSS

SEQ ID NO: 8255 - protein, 98 aa, Homo sapiens
EVQLLESGGGLVQPGGSLRLSCAASGFTFSSYAMSWVRQAPGKGLEWVSTISGSGGSTYYADSVKGRFTISRDNSKNTLYLQMNSLRAEDTAVYYCAK

SEQ ID NO: 8256 - protein, 125 aa, Homo sapiens
EVQLLESGGGLVQPGGSLRLSCAASGFTFSSYAMSWVRQAPGKGLEWVSTISGSGGSTYYADSVKGRFTISRDNSKNTLYLQMNSLRAEDTAVYYCAKAEYYGSGSYYWGYFDYWGQGTLVTVSS

SEQ ID NO: 8257 - protein, 98 aa, Homo sapiens
EVQLLESGGGLVQPGGSLRLSCAASGFTFSSYAMTWVRQAPGKGLEWVSVISGTGISTYYADSVKGRFTISRDNSKKMLYLQMNSLRAEDTAVYYCAK

SEQ ID NO: 8258 - protein, 123 aa, Homo sapiens
EVQLLESGGGLVQPGGSLRLSCAASGFTFSSYAMTWVRQAPGKGLEWVSVISGTGISTYYADSVKGRFTISRDNSKKMLYLQMNSLRAEDTAVYYCAKDLRELPPPAGAFDLWGHGTRVTVSS

SEQ ID NO: 8259 - protein, 98 aa, Homo sapiens
EVQLLESGGGLVQPGGSLRLSCAASGFTFSSYAVSWVRQAPGTGLEWVSSVSGSGISTYYADSVKGRFTISRDNSKNTLYLQMNSLRAEDTAVYYCAK

SEQ ID NO: 8260 - protein, 123 aa, Homo sapiens
EVQLLESGGGLVQPGGSLRLSCAASGFTFSSYAVSWVRQAPGTGLEWVSSVSGSGISTYYADSVKGRFTISRDNSKNTLYLQMNSLRAEDTAVYYCAKDLSRQQWDSGYFDYWGQGTLVTVSS

SEQ ID NO: 8261 - protein, 98 aa, Homo sapiens
EVQLLESGGGLVQPGGSLRLSCAASGFTFSSYGMSCVRQAPGKGLEWVSHISGGGTITYYADSVKGRFTISRDNSKNTLYVQMNSLRADDTAVYYCAK

SEQ ID NO: 8262 - protein, 124 aa, Homo sapiens
EVQLLESGGGLVQPGGSLRLSCAASGFTFSSYGMSCVRQAPGKGLEWVSHISGGGTITYYADSVKGRFTISRDNSKNTLYVQMNSLRADDTAVYYCAKVESSSAGGRPWYFDLWGRGMLVTVSS

SEQ ID NO: 8263 - protein, 98 aa, Homo sapiens
EVQLLESGGGLVQPGGSLRLSCAASGFTFSSYGMSWVRQAPGKGLEWVSAISGSGISTYYADSVKGRFTISRDNSKNTLSLQMNSVRVEDTAVYYCAK

SEQ ID NO: 8264 - protein, 122 aa, Homo sapiens
EVQLLESGGGLVQPGGSLRLSCAASGFTFSSYGMSWVRQAPGKGLEWVSAISGSGISTYYADSVKGRFTISRDNSKNTLSLQMNSVRVEDTAVYYCAKGRRGPFEDGWFDTWGQGTLVTVSS

SEQ ID NO: 8265 - protein, 98 aa, Homo sapiens
EVQLLESGGGLVQPGGSLRLSCAASGFTFSTFGMSWVRQAPGKGLQWVSYISATGGSTYYEDSVKGRFTIARDNSKNTLYLQMKSLRAEDTAVYYCAK

SEQ ID NO: 8266 - protein, 123 aa, Homo sapiens
EVQLLESGGGLVQPGGSLRLSCAASGFTFSTFGMSWVRQAPGKGLQWVSYISATGGSTYYEDSVKGRFTIARDNSKNTLYLQMKSLRAEDTAVYYCAKFQSRSIPVAGNFDYWGQGTLVTVSS

SEQ ID NO: 8267 - protein, 98 aa, Homo sapiens
EVQLLESGGGLVQPGGSLRLSCAASGFTFSTYAMSWVRQAPGKGLEWVSTISSSRLSTYYADSVKGRFTISRDNSKNTLYLQMNSLSAEDTAVYYCAK

SEQ ID NO: 8268 - protein, 123 aa, Homo sapiens
EVQLLESGGGLVQPGGSLRLSCAASGFTFSTYAMSWVRQAPGKGLEWVSTISSSRLSTYYADSVKGRFTISRDNSKNTLYLQMNSLSAEDTAVYYCAKDLMVSIPLTGSLDYWGQGTLVTVSS

SEQ ID NO: 8269 - protein, 97 aa, Homo sapiens
EVQLLESGGGLVQPGGSLRLSCAASGFTFSTYAMTWVRQAPGKGLEWVSTISGSGGSTYYADSVKGRFTISRDNSKNTLYLQMRSLRVEDTAVYYCA

SEQ ID NO: 8270 - protein, 124 aa, Homo sapiens
EVQLLESGGGLVQPGGSLRLSCAASGFTFSTYAMTWVRQAPGKGLEWVSTISGSGGSTYYADSVKGRFTISRDNSKNTLYLQMRSLRVEDTAVYYCASPGSLRELSLYGRIAHWGQGTLVTVSS

SEQ ID NO: 8271 - protein, 98 aa, Homo sapiens
EVQLLESGGGLVQPGGSLRLSCAASGFTFSTYFMTWVRQAPGKGLEWVSAVSGSGGSTYYTDSVKGRFTISRDNSKNTVYLQMKSLRAEDTAVYYCAK

SEQ ID NO: 8272 - protein, 123 aa, Homo sapiens
EVQLLESGGGLVQPGGSLRLSCAASGFTFSTYFMTWVRQAPGKGLEWVSAVSGSGGSTYYTDSVKGRFTISRDNSKNTVYLQMKSLRAEDTAVYYCAKDLSRHIPTSGAFDVWGQGTMVTVSS

SEQ ID NO: 8273 - protein, 98 aa, Homo sapiens
EVQLLESGGGLVQPGGSLRLSCAASGFTFTKSAMTWVRQTPGKGLVWISSIRRGGDKIYYADSLKGRFTMSRDNSKNTVYLQMNSLRVEDTAVYFCAK

SEQ ID NO: 8274 - protein, 120 aa, Homo sapiens
EVQLLESGGGLVQPGGSLRLSCAASGFTFTKSAMTWVRQTPGKGLVWISSIRRGGDKIYYADSLKGRFTMSRDNSKNTVYLQMNSLRVEDTAVYFCAKDWVSETTGIDNWGQGTLVTVSS

SEQ ID NO: 8275 - protein, 100 aa, Homo sapiens
EVQLLESGGGLVQPGGSLRLSCAASGFTFTNYAMSWVRQPPGMGLEWVSGIRATGSGGSTLYADSVKGRFTISRDESKKTLYLQMNNLRAEDTAVYFCAK

SEQ ID NO: 8276 - protein, 124 aa, Homo sapiens
EVQLLESGGGLVQPGGSLRLSCAASGFTFTNYAMSWVRQPPGMGLEWVSGIRATGSGGSTLYADSVKGRFTISRDESKKTLYLQMNNLRAEDTAVYFCAKDRREATDYYSYDSWGQGTLVTVSS

SEQ ID NO: 8277 - protein, 98 aa, Homo sapiens
EVQLLESGGGLVQPGGSLRLSCAASGFTFTNYVMTWVRQAPGKGLEWVSAISGSGLSTYYADSVKGRFTISRDNSKNTLYLQMNSLRAEDTAVYYCAK

SEQ ID NO: 8278 - protein, 123 aa, Homo sapiens
EVQLLESGGGLVQPGGSLRLSCAASGFTFTNYVMTWVRQAPGKGLEWVSAISGSGLSTYYADSVKGRFTISRDNSKNTLYLQMNSLRAEDTAVYYCAKAERHYIPMAGYFDYWGQGTLVTVSS

SEQ ID NO: 8279 - protein, 98 aa, Homo sapiens
EVQLLESGGGLVQPGGSLRLSCAASGFTFTSYAMRWVRQAPGKGLEWVSAISTSGGSRYYADSVKGRFTISRDNSRNTLYLQMNSLRAEDTAVYYCAK

SEQ ID NO: 8280 - protein, 123 aa, Homo sapiens
EVQLLESGGGLVQPGGSLRLSCAASGFTFTSYAMRWVRQAPGKGLEWVSAISTSGGSRYYADSVKGRFTISRDNSRNTLYLQMNSLRAEDTAVYYCAKEMRRDIATAGYFDYWGQGTLVTVSS

SEQ ID NO: 8281 - protein, 98 aa, Homo sapiens
EVQLLESGGGLVQPGGSLRLSCAASGVIFSSYTMNWVRQAPGKGLEWVSSISGSGGSTYYADSVKGRFIISRDPSKNTLSLQMNSLRAEDTAVYYCAK

SEQ ID NO: 8282 - protein, 121 aa, Homo sapiens
EVQLLESGGGLVQPGGSLRLSCAASGVIFSSYTMNWVRQAPGKGLEWVSSISGSGGSTYYADSVKGRFIISRDPSKNTLSLQMNSLRAEDTAVYYCAKGGRVPWLGYMDVWGRGTTVIVSS

SEQ ID NO: 8283 - protein, 98 aa, Homo sapiens
EVQLLESGGGLVQPGGSLRLSCAATGFPFSSYAMHWVRQAPGKGLEWVSSISATGLSTYYIDSVKGRFTISRGKSETTVYLQMNSLRAEDTAVYYCVK

SEQ ID NO: 8284 - protein, 123 aa, Homo sapiens
EVQLLESGGGLVQPGGSLRLSCAATGFPFSSYAMHWVRQAPGKGLEWVSSISATGLSTYYIDSVKGRFTISRGKSETTVYLQMNSLRAEDTAVYYCVKDRVIQVWATGTFDFWGRGTMVTVAS

SEQ ID NO: 8285 - protein, 97 aa, Homo sapiens
EVQLLESGGGLVQPGGSLRLSCAGTGFILGNYAVSWVRQAPGKGLEWVAGINTAGDTTYYADSVKGRSTISRDNFKDTVSLQVDSLRADDMAIYYCT

SEQ ID NO: 8286 - protein, 124 aa, Homo sapiens
EVQLLESGGGLVQPGGSLRLSCAGTGFILGNYAVSWVRQAPGKGLEWVAGINTAGDTTYYADSVKGRSTISRDNFKDTVSLQVDSLRADDMAIYYCTRDPRPTYDAGWHIFASWGQGARVIVSS

SEQ ID NO: 8287 - protein, 98 aa, Homo sapiens
EVQLLESGGGLVQPGGSLRLSCASSGFSFSSYSMNWVRQAPGKGLEWVSAISPSSDSTSHTDSVKGRFTISRDNSKNTLFLEMSSLRAEDTAVYYCAR

SEQ ID NO: 8288 - protein, 119 aa, Homo sapiens
EVQLLESGGGLVQPGGSLRLSCASSGFSFSSYSMNWVRQAPGKGLEWVSAISPSSDSTSHTDSVKGRFTISRDNSKNTLFLEMSSLRAEDTAVYYCAREPEGLGHYDHWGQGTLVTVSS

SEQ ID NO: 8289 - protein, 98 aa, Homo sapiens
EVQLLESGGGLVQPGGSLRLSCATSGFTFSNYAMSWVRQAPGMGLEWVSGIRGSGGSTLYAASVKGRFTISRDESKKMLYLQMNSLRAEDTAIYYCAK

SEQ ID NO: 8290 - protein, 122 aa, Homo sapiens
EVQLLESGGGLVQPGGSLRLSCATSGFTFSNYAMSWVRQAPGMGLEWVSGIRGSGGSTLYAASVKGRFTISRDESKKMLYLQMNSLRAEDTAIYYCAKDRREGSDYYSYDYWGQGTLVTVSS

SEQ ID NO: 8291 - protein, 98 aa, Homo sapiens
EVQLLESGGGLVQPGGSLRLSCATSGFTFSSYGMSWVRQAPGKGLEWVSYISGSGISTYYADSVKGRFTISRDNSKNTLYLQMNSLRAEDSATYYCAK

SEQ ID NO: 8292 - protein, 123 aa, Homo sapiens
EVQLLESGGGLVQPGGSLRLSCATSGFTFSSYGMSWVRQAPGKGLEWVSYISGSGISTYYADSVKGRFTISRDNSKNTLYLQMNSLRAEDSATYYCAKPRPSGIPVAGRLDYWGQGTLVTVSS

SEQ ID NO: 8293 - protein, 98 aa, Homo sapiens
EVQLLESGGGLVQPGGSLRLSCAVSGFIFTNYGMSWVRQAPGKGLEWVSFISGSGFSTYYADSVKGRFTISRDNSKNTLYMQMNSLRAEDTAIYYCAK

SEQ ID NO: 8294 - protein, 122 aa, Homo sapiens
EVQLLESGGGLVQPGGSLRLSCAVSGFIFTNYGMSWVRQAPGKGLEWVSFISGSGFSTYYADSVKGRFTISRDNSKNTLYMQMNSLRAEDTAIYYCAKGQSTVPSTGWFDPWGQGTLVTVSS

SEQ ID NO: 8295 - protein, 98 aa, Homo sapiens
EVQLLESGGGLVQPGGSLRLSCAVSGFSFSNSVMGWVRQAPGKGLEWVSTISGFDGATHYADSVEGRFTISGDSSKNTVLLQMNNLRAEDTAVYYCAR

SEQ ID NO: 8296 - protein, 122 aa, Homo sapiens
EVQLLESGGGLVQPGGSLRLSCAVSGFSFSNSVMGWVRQAPGKGLEWVSTISGFDGATHYADSVEGRFTISGDSSKNTVLLQMNNLRAEDTAVYYCAREGHSSGRCGAFDIWGQGTLVVVSS

SEQ ID NO: 8297 - protein, 97 aa, Homo sapiens
EVQLLESGGGLVQPGGSLRLSCAVSGFTFPRYTMHWVRQAPGKGLEWVCSISGSTLSTYYVDSVKGRFTVSRDNSRNTLHLQIHSLRAEDTATYYCV

SEQ ID NO: 8298 - protein, 122 aa, Homo sapiens
EVQLLESGGGLVQPGGSLRLSCAVSGFTFPRYTMHWVRQAPGKGLEWVCSISGSTLSTYYVDSVKGRFTVSRDNSRNTLHLQIHSLRAEDTATYYCVKGQSTVPSTGWFDPWGQGTLVTVSS

SEQ ID NO: 8299 - protein, 98 aa, Homo sapiens
EVQLLESGGGLVQPGGSLRLSCAVSGFTFSKYAMNWVRQAPGKGLEWVSHISGSGISTYYADSVKGRFTISRDTSKNMLYLQMNSLRAEDTAIYYCAK

SEQ ID NO: 8300 - protein, 124 aa, Homo sapiens
EVQLLESGGGLVQPGGSLRLSCAVSGFTFSKYAMNWVRQAPGKGLEWVSHISGSGISTYYADSVKGRFTISRDTSKNMLYLQMNSLRAEDTAIYYCAKDAISGQIWLQGTFDYWGQGTLVTVSS

SEQ ID NO: 8301 - protein, 98 aa, Homo sapiens
EVQLLESGGGLVQPGGSLRLSCAVSGFTFSSYAMHWVRQAPGKGLEWVSHISDSGYSTYYADSVKGRFTISRDNSKNKLYLQMNSLRAEDTAVYYCAK

SEQ ID NO: 8302 - protein, 124 aa, Homo sapiens
EVQLLESGGGLVQPGGSLRLSCAVSGFTFSSYAMHWVRQAPGKGLEWVSHISDSGYSTYYADSVKGRFTISRDNSKNKLYLQMNSLRAEDTAVYYCAKDGISRQVWLQGTFDSWGQGTLVTVSS

SEQ ID NO: 8303 - protein, 98 aa, Homo sapiens
EVQLLESGGGLVQPGGSLRLSCAVSGLSFSNSVMGWVRQAPGKGLEWVATISGIDGATHYADSAEGRFTISGDTSKNTLFLQMNSLRPDDTAVYYCAR

SEQ ID NO: 8304 - protein, 122 aa, Homo sapiens
EVQLLESGGGLVQPGGSLRLSCAVSGLSFSNSVMGWVRQAPGKGLEWVATISGIDGATHYADSAEGRFTISGDTSKNTLFLQMNSLRPDDTAVYYCAREGHTSGHCGAFNLWGQGTLVAVSS

SEQ ID NO: 8305 - protein, 98 aa, Homo sapiens
EVQLLESGGGLVQPGGSLRLSCEASGFTFISYAMSWVRQAPGKGLEWVSAISGGGSSTYYADSVKGRFTISRDNSKNTLYLQMSSLRVEDTAVYYCAK

SEQ ID NO: 8306 - protein, 122 aa, Homo sapiens
EVQLLESGGGLVQPGGSLRLSCEASGFTFISYAMSWVRQAPGKGLEWVSAISGGGSSTYYADSVKGRFTISRDNSKNTLYLQMSSLRVEDTAVYYCAKTEWELKRHWYFDLWGRGILVTVSS

SEQ ID NO: 8307 - protein, 98 aa, Homo sapiens
EVQLLESGGGLVQPGGSLRLSCTASGFSFSRFTMFWVRQAPGKGLEWVSSITSSGISTYYTDSVKGRFTISRDNSKNTLFLQMNSLRAADTAVYYCAK

SEQ ID NO: 8308 - protein, 123 aa, Homo sapiens
EVQLLESGGGLVQPGGSLRLSCTASGFSFSRFTMFWVRQAPGKGLEWVSSITSSGISTYYTDSVKGRFTISRDNSKNTLFLQMNSLRAADTAVYYCAKDLEIAVWGSGYFDYWGQGTLVTVSS

SEQ ID NO: 8309 - protein, 98 aa, Homo sapiens
EVQLLESGGGLVQPGGSLRLSCTASGFTFSNHAISWVRQAPGKGLEWVSSISGTSLSRYYVDSVKGRFTISRDNSKNTLYLQMNSLRVEDTAIYYCAK

SEQ ID NO: 8310 - protein, 122 aa, Homo sapiens
EVQLLESGGGLVQPGGSLRLSCTASGFTFSNHAISWVRQAPGKGLEWVSSISGTSLSRYYVDSVKGRFTISRDNSKNTLYLQMNSLRVEDTAIYYCAKDRTVPALGGWFEHWGKGVLVTVST

SEQ ID NO: 8311 - protein, 98 aa, Homo sapiens
EVQLLESGGGLVQPGGSLRLSCTASGFTFTSYAMRWVRQAPGKGLKWVSDISASGGSTYYADSVKGRFTISRDNSRNTLYLRMSSLRADDTAVYYCAK

SEQ ID NO: 8312 - protein, 123 aa, Homo sapiens
EVQLLESGGGLVQPGGSLRLSCTASGFTFTSYAMRWVRQAPGKGLKWVSDISASGGSTYYADSVKGRFTISRDNSRNTLYLRMSSLRADDTAVYYCAKDLSTMIPFGGVSSSWGQGTLVTVSS

SEQ ID NO: 8313 - protein, 98 aa, Homo sapiens
EVQLLESGGGLVQPGGSLRLSCVASGFTFSSYAMSWVRQAPGKGLEWVSGISTSGHSTYYADSVKGRFTVSRDNSKNTLYLQMNSLRGEDTAVYYCAK

SEQ ID NO: 8314 - protein, 123 aa, Homo sapiens
EVQLLESGGGLVQPGGSLRLSCVASGFTFSSYAMSWVRQAPGKGLEWVSGISTSGHSTYYADSVKGRFTVSRDNSKNTLYLQMNSLRGEDTAVYYCAKNDDYVWGSYRSLDYWGQGTLVTVSS

SEQ ID NO: 8315 - protein, 98 aa, Homo sapiens
EVQLLESGGGLVQPGGSLRLSCVASGFTFTSYAMSWVRQAPGKGLEWISTISGTGLSTYYADSVKGRFTISRDNSKNTLYVQMNSLRAEDTAIYYCAK

SEQ ID NO: 8316 - protein, 123 aa, Homo sapiens
EVQLLESGGGLVQPGGSLRLSCVASGFTFTSYAMSWVRQAPGKGLEWISTISGTGLSTYYADSVKGRFTISRDNSKNTLYVQMNSLRAEDTAIYYCAKDRVIPVPGTGHFDFWGQGTLVTVSS

SEQ ID NO: 8317 - protein, 98 aa, Homo sapiens
EVQLLESGGGLVQPGGSLRLSCVASRFTFTNYVMTWVRQAPGKGLEWVSSISGSGISTYYADSVKGRFTISRDNSKNTLYLHMSSLRAGDTAVYYCAK

SEQ ID NO: 8318 - protein, 122 aa, Homo sapiens
EVQLLESGGGLVQPGGSLRLSCVASRFTFTNYVMTWVRQAPGKGLEWVSSISGSGISTYYADSVKGRFTISRDNSKNTLYLHMSSLRAGDTAVYYCAKGLRLLVESGALDMWGQGTMVTVSS

SEQ ID NO: 8319 - protein, 97 aa, Homo sapiens
EVQLLESGGGLVQPGGSLRLSCVVSDFTFGRHAVSWVRQAPGKGLEWVSGFSGSGGSTYYTDSVKGRFTISRDNSKNTVHLQMNSLRVEDTAVYYCA

SEQ ID NO: 8320 - protein, 124 aa, Homo sapiens
EVQLLESGGGLVQPGGSLRLSCVVSDFTFGRHAVSWVRQAPGKGLEWVSGFSGSGGSTYYTDSVKGRFTISRDNSKNTVHLQMNSLRVEDTAVYYCASPATPRPVVFDYYFDYWGQGTLVTVSS

SEQ ID NO: 8321 - protein, 97 aa, Homo sapiens
EVQLLESGGGLVQPGGSLRLSCVVSGFTFTSYAMTWVRQAPGKGLEWVSAISSGANTYYADSVKGRFTISRDNSKNTLYLQMSSLRVEDTAIYYCAK

SEQ ID NO: 8322 - protein, 124 aa, Homo sapiens
EVQLLESGGGLVQPGGSLRLSCVVSGFTFTSYAMTWVRQAPGKGLEWVSAISSGANTYYADSVKGRFTISRDNSKNTLYLQMSSLRVEDTAIYYCAKAWGYCGRDCYIYYFDSWGQGTLVTVSS

SEQ ID NO: 8323 - protein, 98 aa, Homo sapiens
EVQLLESGGGLVQPGGSLRLYCAASGFTFSRYAMTWVRQAPGKGLEWVSSISGSGISTYYADSVKGRFTISRDNSKNTLYLQMKSLRAEDTAVYYCAK

SEQ ID NO: 8324 - protein, 123 aa, Homo sapiens
EVQLLESGGGLVQPGGSLRLYCAASGFTFSRYAMTWVRQAPGKGLEWVSSISGSGISTYYADSVKGRFTISRDNSKNTLYLQMKSLRAEDTAVYYCAKDAEWTPPRQGYMDVWGKGTTVTVSS

SEQ ID NO: 8325 - protein, 98 aa, Homo sapiens
EVQLLESGGGLVQPGGSLRVSCAASGFTFSKYAMNWVRQAPGKGLEWVSSISASGGSTYYADSVKGRFTISRDNSKNTVSVQMRSLRGEDTAVYYCAK

SEQ ID NO: 8326 - protein, 123 aa, Homo sapiens
EVQLLESGGGLVQPGGSLRVSCAASGFTFSKYAMNWVRQAPGKGLEWVSSISASGGSTYYADSVKGRFTISRDNSKNTVSVQMRSLRGEDTAVYYCAKAGSHLIPYSGSLDSWGQGTLVTVSS

SEQ ID NO: 8327 - protein, 98 aa, Homo sapiens
EVQLLESGGGLVQPGGTLRLSCTASGFTYSSFVMFWVRQAPGKGLEWVSSISGSGLSTYYAESVKGRFTISRDNSKNTLYLHMRSLRADDTAIYYCAK

SEQ ID NO: 8328 - protein, 123 aa, Homo sapiens
EVQLLESGGGLVQPGGTLRLSCTASGFTYSSFVMFWVRQAPGKGLEWVSSISGSGLSTYYAESVKGRFTISRDNSKNTLYLHMRSLRADDTAIYYCAKDYSTYIPVTGTLDSWGQGTLVTVSS

SEQ ID NO: 8329 - protein, 98 aa, Homo sapiens
EVQLLESGGGLVQPGKSLRLSCAASGFSFGNYAMYWVRQAPGKGLEWVSSISGTGLSRYYIDSVKGRFTISRDDSRNTVYLQMSGLRAEDTAVYYCVK

SEQ ID NO: 8330 - protein, 125 aa, Homo sapiens
EVQLLESGGGLVQPGKSLRLSCAASGFSFGNYAMYWVRQAPGKGLEWVSSISGTGLSRYYIDSVKGRFTISRDDSRNTVYLQMSGLRAEDTAVYYCVKDRVTYNKVVVQGTFDVWGQGTKVTVSS

SEQ ID NO: 8331 - protein, 98 aa, Homo sapiens
EVQLLESGGGLVQPGKSLRLSCAASGFTFSNYVMSWVRQAPGKGLEWVSAISGSGLSTYYADSVKGRFTISRDNSKNTLYLQMNSLRAEDTAVYYCAK

SEQ ID NO: 8332 - protein, 124 aa, Homo sapiens
EVQLLESGGGLVQPGKSLRLSCAASGFTFSNYVMSWVRQAPGKGLEWVSAISGSGLSTYYADSVKGRFTISRDNSKNTLYLQMNSLRAEDTAVYYCAKDVVATNPPLSGYFDYWGQGILVTVSS

SEQ ID NO: 8333 - protein, 98 aa, Homo sapiens
EVQLLESGGGLVQPGRSLRLSCAASGFTFSRYGMSWVRQAPGKGLQWVSHISASGLSTYYADSVKGRFTISRDNSKNTLYLQMTSLRAEDTAVYFCTK

SEQ ID NO: 8334 - protein, 123 aa, Homo sapiens
EVQLLESGGGLVQPGRSLRLSCAASGFTFSRYGMSWVRQAPGKGLQWVSHISASGLSTYYADSVKGRFTISRDNSKNTLYLQMTSLRAEDTAVYFCTKDQGVVVPTAIPLFYWGQGSLVTVSS

SEQ ID NO: 8335 - protein, 100 aa, Homo sapiens
EVQLLESGGGLVQPGWSLRLSCAASGFTFSSYAMTWVRQAPGKGLEWVSSISGSGSGGTTYYADSVKGRFTISRDNSKNTVYLQMNSLRAEDTAAYYCAK

SEQ ID NO: 8336 - protein, 125 aa, Homo sapiens
EVQLLESGGGLVQPGWSLRLSCAASGFTFSSYAMTWVRQAPGKGLEWVSSISGSGSGGTTYYADSVKGRFTISRDNSKNTVYLQMNSLRAEDTAAYYCAKDWEKSSCEGECLNYWGQGTLVTVSS

SEQ ID NO: 8337 - protein, 98 aa, Homo sapiens
EVQLLESGGGLVQRGGSLRLSCAASGFTFSSHAMTWVRQAPGKGLEWVSSISGSDTKTYYAGAVKGRFTISRDNSKNTLYLQMNSLRAEDTAVYYCVT

SEQ ID NO: 8338 - protein, 123 aa, Homo sapiens
EVQLLESGGGLVQRGGSLRLSCAASGFTFSSHAMTWVRQAPGKGLEWVSSISGSDTKTYYAGAVKGRFTISRDNSKNTLYLQMNSLRAEDTAVYYCVTDWQTSSCGDDCLINWGQGTPVTVSS

SEQ ID NO: 8339 - protein, 97 aa, Homo sapiens
EVQLLESGGGLVQRGGSLRLSCAASGLRFRSYAMSWVRQAPGKGLEWVSVISGSGLSTYYADSVKGRFTISSDNSKNMLSLQMNSLRADDTAVYYCA

SEQ ID NO: 8340 - protein, 121 aa, Homo sapiens
EVQLLESGGGLVQRGGSLRLSCAASGLRFRSYAMSWVRQAPGKGLEWVSVISGSGLSTYYADSVKGRFTISSDNSKNMLSLQMNSLRADDTAVYYCAKGVGFPHYYYMDVWGRGTTVTVSS

SEQ ID NO: 8341 - protein, 98 aa, Homo sapiens
EVQLLESGGGLVQRGGSLRLSCEASGFTFSTYDMSWVRQAPGKGLEWVSTISGTDGSTYYADSVKGRFTISRDNSKNTLYVQLNSLRVEDTAVYYCAK

SEQ ID NO: 8342 - protein, 127 aa, Homo sapiens
EVQLLESGGGLVQRGGSLRLSCEASGFTFSTYDMSWVRQAPGKGLEWVSTISGTDGSTYYADSVKGRFTISRDNSKNTLYVQLNSLRVEDTAVYYCAKRYFDRTVYPRASSDYFDYWGQGTLVTVSS

SEQ ID NO: 8343 - protein, 98 aa, Homo sapiens
EVQLLESGGGLVRPGGSLRLSCATSGFAFGIYAMSWVRQAPGKGLEWVSSIRGSGTETHYTDSVKGRFTISRDNSKNTLYLQMNGLRAEDTAVYYCAK

SEQ ID NO: 8344 - protein, 123 aa, Homo sapiens
EVQLLESGGGLVRPGGSLRLSCATSGFAFGIYAMSWVRQAPGKGLEWVSSIRGSGTETHYTDSVKGRFTISRDNSKNTLYLQMNGLRAEDTAVYYCAKSAGGGDPKAGTFDFWGQGTLVTVSS

SEQ ID NO: 8345 - protein, 98 aa, Homo sapiens
EVQLLESGGGWVQPGGSLRLSCAASGFTFTTYAMSWVRRAPGRGLEWVSTITGTGLSTYYADSVKGRFTISRDNSKNTLFLQMTSLRADDTAIYYCAK

SEQ ID NO: 8346 - protein, 123 aa, Homo sapiens
EVQLLESGGGWVQPGGSLRLSCAASGFTFTTYAMSWVRRAPGRGLEWVSTITGTGLSTYYADSVKGRFTISRDNSKNTLFLQMTSLRADDTAIYYCAKDSRSWIAVAGSFDSWGQGTQVTVSS

SEQ ID NO: 8347 - protein, 98 aa, Homo sapiens
EVQLLESGGNLIQPGGSLRLSCAASGFTFSIYAMSWVRQAPGKGLEWVSSISGNDGATYYGDSVKGRFTISRDNSKNTLYLQMSSLRAEDTAVYYCVK

SEQ ID NO: 8348 - protein, 123 aa, Homo sapiens
EVQLLESGGNLIQPGGSLRLSCAASGFTFSIYAMSWVRQAPGKGLEWVSSISGNDGATYYGDSVKGRFTISRDNSKNTLYLQMSSLRAEDTAVYYCVKDWERESCNGDCLSNWGRGTLVTVSS

SEQ ID NO: 8349 - protein, 98 aa, Homo sapiens
EVQLLESGGNLVQPGGSLRLSCAASGFTFNDYAINWVRQAPGKGLDWVSAIRGDGGNKYYAGSVKGRFTISRDSSKNTVYLQMNSLRAEDTAVYYCAK

SEQ ID NO: 8350 - protein, 123 aa, Homo sapiens
EVQLLESGGNLVQPGGSLRLSCAASGFTFNDYAINWVRQAPGKGLDWVSAIRGDGGNKYYAGSVKGRFTISRDSSKNTVYLQMNSLRAEDTAVYYCAKGRYRGDWTVDTLHFWGQGTRVTVSS

SEQ ID NO: 8351 - protein, 97 aa, Homo sapiens
EVQLLESGGNLVQPGGSLRLSCAASGFTFSDYAMGWVRQAPGKGLEWVSDIIINGRTYYADSVQGRFTISRDDSTDTLFLQMNSLRVDDTALYYCAK

SEQ ID NO: 8352 - protein, 119 aa, Homo sapiens
EVQLLESGGNLVQPGGSLRLSCAASGFTFSDYAMGWVRQAPGKGLEWVSDIIINGRTYYADSVQGRFTISRDDSTDTLFLQMNSLRVDDTALYYCAKNRGARVGGFDAWGQGTMVTVSS

SEQ ID NO: 8353 - protein, 97 aa, Homo sapiens
EVQLLESGGNLVQPGGSLSLSCEASGFTFKNYVMSWVRQAPGKGLEWVASISGSSLSTYYVDSVKGRFTISRDNSKNRLYLHMSSLRAEDTAVYYCA

SEQ ID NO: 8354 - protein, 123 aa, Homo sapiens
EVQLLESGGNLVQPGGSLSLSCEASGFTFKNYVMSWVRQAPGKGLEWVASISGSSLSTYYVDSVKGRFTISRDNSKNRLYLHMSSLRAEDTAVYYCALQGRIGTSRYGDFDSWGQGVLVTVSS

SEQ ID NO: 8355 - protein, 97 aa, Homo sapiens
EVQLLESGGTLVQPGGSLRLSCAASGFTFSNYAMTWVRQAPGKGLEWVSSISGGGTTHYADSVMGRFTISRDNSKNTLYLQMNSLRAEDTALYYCAK

SEQ ID NO: 8356 - protein, 122 aa, Homo sapiens
EVQLLESGGTLVQPGGSLRLSCAASGFTFSNYAMTWVRQAPGKGLEWVSSISGGGTTHYADSVMGRFTISRDNSKNTLYLQMNSLRAEDTALYYCAKDWETSSCNGDCLSNWGQGTLVTVSS

SEQ ID NO: 8357 - protein, 97 aa, Homo sapiens
EVQLLGSGGGLVQPGGSLRLSCVASGFTFTNYAMTWVRQAPGKGLEWVSSLTADEGRRYYADSVKGRFTISRDNSKDTLYLQMNSLRVEDTAVYYCA

SEQ ID NO: 8358 - protein, 121 aa, Homo sapiens
EVQLLGSGGGLVQPGGSLRLSCVASGFTFTNYAMTWVRQAPGKGLEWVSSLTADEGRRYYADSVKGRFTISRDNSKDTLYLQMNSLRVEDTAVYYCAPTAGGSGTYWVHSWGQGTLVTVSS

SEQ ID NO: 8359 - protein, 98 aa, Homo sapiens
EVQLLQSGAEVKKPGESLKISCEGSGYNFASYWIAWVRQMPGKGLEWMGNIYPGDSDTKYSPSFQGQVTFSADKSINTAYLQWSGLQASDTAIYYCAR

SEQ ID NO: 8360 - protein, 118 aa, Homo sapiens
EVQLLQSGAEVKKPGESLKISCEGSGYNFASYWIAWVRQMPGKGLEWMGNIYPGDSDTKYSPSFQGQVTFSADKSINTAYLQWSGLQASDTAIYYCARRHTDYNMDVWGNGTAVTVSS

SEQ ID NO: 8361 - protein, 98 aa, Homo sapiens
EVQLLQSGAEVKKPGESLKISCKTSGYDFTKYWIGWVRQMPGKGLEWMGVIWPGDSDTRYSPSFEGQVSISADKFISTAYLQWSGLKASDTAMYYCAR

SEQ ID NO: 8362 - protein, 123 aa, Homo sapiens
EVQLLQSGAEVKKPGESLKISCKTSGYDFTKYWIGWVRQMPGKGLEWMGVIWPGDSDTRYSPSFEGQVSISADKFISTAYLQWSGLKASDTAMYYCARFREYADHYVGRFDFWGQGTLVTVSS

SEQ ID NO: 8363 - protein, 98 aa, Homo sapiens
EVQLLQSGAEVKKPGESLKISCKTSGYSFTTHWIGWVRQMPGKGLEWMGVIWPGDSDTRYNRSFEGQVTLSVDNSISTAYLQWSSLKASDTAMYYCAR

SEQ ID NO: 8364 - protein, 123 aa, Homo sapiens
EVQLLQSGAEVKKPGESLKISCKTSGYSFTTHWIGWVRQMPGKGLEWMGVIWPGDSDTRYNRSFEGQVTLSVDNSISTAYLQWSSLKASDTAMYYCARLREYADHYVGRFDFWGQGTLVTVSS

SEQ ID NO: 8365 - protein, 98 aa, Homo sapiens
EVQLMEAGGGLVKAGGSLTLSCAASGFTFSDYSMNWIRQTPGKGLEWVSTISSNGEHIHYADSVKGRFTISRDNAKNSLYLQLNSLRAEDTAVYFCAK

SEQ ID NO: 8366 - protein, 123 aa, Homo sapiens
EVQLMEAGGGLVKAGGSLTLSCAASGFTFSDYSMNWIRQTPGKGLEWVSTISSNGEHIHYADSVKGRFTISRDNAKNSLYLQLNSLRAEDTAVYFCAKDKSTWAVVADDLDYWGQGTLVTVSS

SEQ ID NO: 8367 - protein, 98 aa, Homo sapiens
EVQLMESGGGLVQPAGSLRLSCAASGFNFSSYEMNWVRQAPGRRLEWVSYISGGGDTMYYADSVKGRFTISRDNAKNSLYLQMNSLRADDTAVYYCAR

SEQ ID NO: 8368 - protein, 116 aa, Homo sapiens
EVQLMESGGGLVQPAGSLRLSCAASGFNFSSYEMNWVRQAPGRRLEWVSYISGGGDTMYYADSVKGRFTISRDNAKNSLYLQMNSLRADDTAVYYCARDHPLYDFWGQGTLVTVSS

SEQ ID NO: 8369 - protein, 98 aa, Homo sapiens
EVQLMESGGGLVQPGGSLKLSCAASGFTFSASTMHWVRQASGKGLEWVGHIRSKFSSYATAYGVSVKGRFTVSRDDSKNMAYLEMNSLKIEDTAMYYC

SEQ ID NO: 8370 - protein, 128 aa, Homo sapiens
EVQLMESGGGLVQPGGSLKLSCAASGFTFSASTMHWVRQASGKGLEWVGHIRSKFSSYATAYGVSVKGRFTVSRDDSKNMAYLEMNSLKIEDTAMYYCARRSPGGVYDSWSGSYLSHWGQGTLVTVSS

SEQ ID NO: 8371 - protein, 98 aa, Homo sapiens
EVQLMESGGGLVQPGGSLRLSCAASGFTFSRYVMGWVRQAPGKGLEWVSTISGTGISSYYGDSVKGRFTVSRDNSKNMVYLQMNGLRADDTALYFCAK

SEQ ID NO: 8372 - protein, 121 aa, Homo sapiens
EVQLMESGGGLVQPGGSLRLSCAASGFTFSRYVMGWVRQAPGKGLEWVSTISGTGISSYYGDSVKGRFTVSRDNSKNMVYLQMNGLRADDTALYFCAKGGSHPTYNWFDPWGQGTLVSVSS

SEQ ID NO: 8373 - protein, 98 aa, Homo sapiens
EVQLMESGGGLVQPGGSLRLSCAGSGFTLSGYVMSWVRQAPGKGLEWVSSISSSGGSTYYADSVKGRFTISRDTSKNTLYLLMNSLRAEDTAVYYCAK

SEQ ID NO: 8374 - protein, 123 aa, Homo sapiens
EVQLMESGGGLVQPGGSLRLSCAGSGFTLSGYVMSWVRQAPGKGLEWVSSISSSGGSTYYADSVKGRFTISRDTSKNTLYLLMNSLRAEDTAVYYCAKDRTGYVPVTGLFDSWGQGTLVAVSS

SEQ ID NO: 8375 - protein, 98 aa, Homo sapiens
EVQLMESGGGWVQPGGSLRLSCAASGFTFSDYEMHWVRQAPGKGLEWVSSIRSYAGFISYTDSVKGRFTISRDNAKNLLFLQMNSLRSEDTAVYYCVR

SEQ ID NO: 8376 - protein, 125 aa, Homo sapiens
EVQLMESGGGWVQPGGSLRLSCAASGFTFSDYEMHWVRQAPGKGLEWVSSIRSYAGFISYTDSVKGRFTISRDNAKNLLFLQMNSLRSEDTAVYYCVRGAIWEDLSGYYTHFDYWGQGTLVSVSS

SEQ ID NO: 8377 - protein, 97 aa, Homo sapiens
EVQLMQSGAEVKKPGESLKISCKGSGYRFTNYWIGWVRQKPGKGLEWMGIIHLGDSETRYSPSFQGQVTISADKSISTAYVQWSSLKASDTAMYFCA

SEQ ID NO: 8378 - protein, 121 aa, Homo sapiens
EVQLMQSGAEVKKPGESLKISCKGSGYRFTNYWIGWVRQKPGKGLEWMGIIHLGDSETRYSPSFQGQVTISADKSISTAYVQWSSLKASDTAMYFCAFCSGTYEPRPFDVWGQGTMVTVAP

SEQ ID NO: 8379 - protein, 98 aa, Homo sapiens
EVQLQESGGGLVRPGGTLRLSCAASGFSFSNYNMYWVRQAPGKGLEWVSSISGSGLSTYYADSVKGRFTISRDKSKNTVYLHMNSLRAEDTALYYCTK

SEQ ID NO: 8380 - protein, 123 aa, Homo sapiens
EVQLQESGGGLVRPGGTLRLSCAASGFSFSNYNMYWVRQAPGKGLEWVSSISGSGLSTYYADSVKGRFTISRDKSKNTVYLHMNSLRAEDTALYYCTKDFSTYIPMTGTFDSWGQGTQVTVSS

SEQ ID NO: 8381 - protein, 97 aa, Homo sapiens
EVQLVATGGGLIQPGGSLRLSCEASGFTVSDNYMSWVRQAPGKGLEWVSILYRGGKTYYADSVKGRFTISSDNSKNTLYLQMNSLRADDTAVYFCAR

SEQ ID NO: 8382 - protein, 126 aa, Homo sapiens
EVQLVATGGGLIQPGGSLRLSCEASGFTVSDNYMSWVRQAPGKGLEWVSILYRGGKTYYADSVKGRFTISSDNSKNTLYLQMNSLRADDTAVYFCAREVRFGDDILTGYSDAFDFWGQGTMVTVSA

SEQ ID NO: 8383 - protein, 98 aa, Homo sapiens
EVQLVDSGGDLVQAGGSLRLSCAASGFTFSTYWMTWVRQAPGKGLEWVANIKPDGSEKHYVDSVKGRFIIDRDNAKNSVYLQMNNLRVDDTAVYFCVR

SEQ ID NO: 8384 - protein, 125 aa, Homo sapiens
EVQLVDSGGDLVQAGGSLRLSCAASGFTFSTYWMTWVRQAPGKGLEWVANIKPDGSEKHYVDSVKGRFIIDRDNAKNSVYLQMNNLRVDDTAVYFCVRDYCNGDSCSREAWGDYWGQGTRVSVSS

SEQ ID NO: 8385 - protein, 98 aa, Homo sapiens
EVQLVDSGGDLVQPGGSLRLSCAASGFTFSNFGMNWVRQAPGKGLEWVSYISSSGSDIYYADSVKGRFTISRDNAKNSLYLQMNSLRDEDTALYHCAR

SEQ ID NO: 8386 - protein, 118 aa, Homo sapiens
EVQLVDSGGDLVQPGGSLRLSCAASGFTFSNFGMNWVRQAPGKGLEWVSYISSSGSDIYYADSVKGRFTISRDNAKNSLYLQMNSLRDEDTALYHCARGEGAWGDNCWGQGTLVTVSS

SEQ ID NO: 8387 - protein, 100 aa, Homo sapiens
EVQLVDSGGDLVQPGGSLRLSCAASGFTISDHYIDWVRRAPGKGLEWVGRSRNKVNKYSTVYLASVQGRFTISRDDSKNSLYLQMNSLKTEDTAVYYCAR

SEQ ID NO: 8388 - protein, 126 aa, Homo sapiens
EVQLVDSGGDLVQPGGSLRLSCAASGFTISDHYIDWVRRAPGKGLEWVGRSRNKVNKYSTVYLASVQGRFTISRDDSKNSLYLQMNSLKTEDTAVYYCARPTDCGGDCQYDVFDIWGQGTMVTVST

SEQ ID NO: 8389 - protein, 97 aa, Homo sapiens
EVQLVDSGGGLVQPGGSLRISCAASGFTFSSYAMSWVRQSPGKGLEWVSSISGSGGSTYYADSVKGRFTISRGTSKYALYLQMNSLRAEDTAVYYCA

SEQ ID NO: 8390 - protein, 123 aa, Homo sapiens
EVQLVDSGGGLVQPGGSLRISCAASGFTFSSYAMSWVRQSPGKGLEWVSSISGSGGSTYYADSVKGRFTISRGTSKYALYLQMNSLRAEDTAVYYCAKSKSRSVPVSGYFDYWGQGTLVTVSS

SEQ ID NO: 8391 - protein, 98 aa, Homo sapiens
EVQLVDSGGGLVQPGGSLRLSCAASGFNFNNYWMSWVRQAPGKGLEWVANINPDGSKTNYVDSVKGRFTISRDNTWRSVSLQMNSLRDDDTAIYYCVR

SEQ ID NO: 8392 - protein, 128 aa, Homo sapiens
EVQLVDSGGGLVQPGGSLRLSCAASGFNFNNYWMSWVRQAPGKGLEWVANINPDGSKTNYVDSVKGRFTISRDNTWRSVSLQMNSLRDDDTAIYYCVRDFCNGDRPATCSRDSWGDYWGQGTQVSVSS

SEQ ID NO: 8393 - protein, 98 aa, Homo sapiens
EVQLVDSGGGLVQPGGSLRLSCAASGFNFSSYWMSWVRQAPGRGLEWVANIKPDGSEKYFIDSVKGRFTISRDNAWKSLSLQMDSLRDDDTAVYYCVR

SEQ ID NO: 8394 - protein, 128 aa, Homo sapiens
EVQLVDSGGGLVQPGGSLRLSCAASGFNFSSYWMSWVRQAPGRGLEWVANIKPDGSEKYFIDSVKGRFTISRDNAWKSLSLQMDSLRDDDTAVYYCVRDYCNGDNGESCSRQSWGDYWGQGTLVSVSS

SEQ ID NO: 8395 - protein, 98 aa, Homo sapiens
EVQLVDSGGGLVQPGGSLRLSCAASGFTFSSYWMSWVRQAPGKGLEWVANIKPDGSAKNYVDSVKGRFTISRDNAWKSLSLQMNSLRDDDTAVYYCVR

SEQ ID NO: 8396 - protein, 128 aa, Homo sapiens
EVQLVDSGGGLVQPGGSLRLSCAASGFTFSSYWMSWVRQAPGKGLEWVANIKPDGSAKNYVDSVKGRFTISRDNAWKSLSLQMNSLRDDDTAVYYCVRDYCNGDNGDSCSRESWGDYWGQGTLVSVSS

SEQ ID NO: 8397 - protein, 98 aa, Homo sapiens
EVQLVDSGGGLVQPGGSLRLTCAASGFTFSSYWMSWVRQAPGKGLEWVANIKPDGSEKNYVDSVKGRFTIYRDNAWRSLSLQMNSLRDDDTAVYYCVR

SEQ ID NO: 8398 - protein, 125 aa, Homo sapiens
EVQLVDSGGGLVQPGGSLRLTCAASGFTFSSYWMSWVRQAPGKGLEWVANIKPDGSEKNYVDSVKGRFTIYRDNAWRSLSLQMNSLRDDDTAVYYCVRDYCNGDGCSRESWGDFWGQGTLVSVSS

SEQ ID NO: 8399 - protein, 98 aa, Homo sapiens
EVQLVEFGGGLVQPGGSLRLSCVGSGFTFSNHWMSWVRQAPGKGLEWVANIKEDGSQKDYVDSVKGRFTISRDNADNSLSLHMNSLRVEDTAVYYCAR

SEQ ID NO: 8400 - protein, 123 aa, Homo sapiens
EVQLVEFGGGLVQPGGSLRLSCVGSGFTFSNHWMSWVRQAPGKGLEWVANIKEDGSQKDYVDSVKGRFTISRDNADNSLSLHMNSLRVEDTAVYYCARQFCGDCTAYRHFDCWGQGTLVTVSS

SEQ ID NO: 8401 - protein, 98 aa, Homo sapiens
EVQLVESGGALVQAGGSLRLSCAASGFSFSRYGMSWVRQAPGKGLEWVSAITDSGGSSYYADSVKGRFTISRDNSKNTLYLQMNSLRDEDTAVYYCAK

SEQ ID NO: 8402 - protein, 124 aa, Homo sapiens
EVQLVESGGALVQAGGSLRLSCAASGFSFSRYGMSWVRQAPGKGLEWVSAITDSGGSSYYADSVKGRFTISRDNSKNTLYLQMNSLRDEDTAVYYCAKSITMIVVVVTYAFDIWGQGTMVTVSS

SEQ ID NO: 8403 - protein, 97 aa, Homo sapiens
EVQLVESGGALVQPGGSLGLSCEASGLNFRTYWMSWVRQAPGKRLEWVANINDDGSQKYHADPVEGRFTISRDNAKRSLYLQMHSLRLEDTAVYFCA

SEQ ID NO: 8404 - protein, 120 aa, Homo sapiens
EVQLVESGGALVQPGGSLGLSCEASGLNFRTYWMSWVRQAPGKRLEWVANINDDGSQKYHADPVEGRFTISRDNAKRSLYLQMHSLRLEDTAVYFCATAWDGDKGAFDVWGQGTMVTVSS

SEQ ID NO: 8405 - protein, 97 aa, Homo sapiens
EVQLVESGGDLAQPGGSLRLSCAASGFTVSSKYMSWVRQAPGKGLEWVSVIYSGDITYYSNSVRGRFTISRDNSRNTLYLQMNSLRAEDTAVYYCAR

SEQ ID NO: 8406 - protein, 119 aa, Homo sapiens
EVQLVESGGDLAQPGGSLRLSCAASGFTVSSKYMSWVRQAPGKGLEWVSVIYSGDITYYSNSVRGRFTISRDNSRNTLYLQMNSLRAEDTAVYYCARGTDSAATRVDAWGQGTTVTVSS

SEQ ID NO: 8407 - protein, 98 aa, Homo sapiens
EVQLVESGGDLAQPGGSLTLSCAASGFTFSSYSFDWVRLAPGKGPEWISYISGDSKSIYYADSAKGRFTISRDNVKNSLYLQMNSLRDEDSAVYYCAR

SEQ ID NO: 8408 - protein, 122 aa, Homo sapiens
EVQLVESGGDLAQPGGSLTLSCAASGFTFSSYSFDWVRLAPGKGPEWISYISGDSKSIYYADSAKGRFTISRDNVKNSLYLQMNSLRDEDSAVYYCAREEVGGSKSWYWAYWGRGTLVTVSS

SEQ ID NO: 8409 - protein, 96 aa, Homo sapiens
EVQLVESGGDLIQPGGSLRLSCAASGFTFSSYEMNWVRQAPGKGLEWVAYINSSSTNIHYGDSVKGRFTISRDNAENSLYLQMNSLRVEDTAVYYC

SEQ ID NO: 8410 - protein, 121 aa, Homo sapiens
EVQLVESGGDLIQPGGSLRLSCAASGFTFSSYEMNWVRQAPGKGLEWVAYINSSSTNIHYGDSVKGRFTISRDNAENSLYLQMNSLRVEDTAVYYCVGTYYSSSSGYLKHWGQGTLITVSP

SEQ ID NO: 8411 - protein, 98 aa, Homo sapiens
EVQLVESGGDLIQPGGTLRLSCAASGFTFSNYVMYWVRQAPGKGLEWVSSISGSGGSAYYADSVRGRFTVSRDTSKNTLYLQINSLRTEDTAVYYCAK

SEQ ID NO: 8412 - protein, 123 aa, Homo sapiens
EVQLVESGGDLIQPGGTLRLSCAASGFTFSNYVMYWVRQAPGKGLEWVSSISGSGGSAYYADSVRGRFTVSRDTSKNTLYLQINSLRTEDTAVYYCAKDQSTFIPVTGTLDYWGQGTLVTVSS

SEQ ID NO: 8413 - protein, 98 aa, Homo sapiens
EVQLVESGGDLVHPGESLRLSCAASGFTFSGCAMHWVRQAPGKGLEYVSAISSNGDSTYYANSVKGRFTISRDNSKNTLYLQMGSLRAEDSAVYYCAR

SEQ ID NO: 8414 - protein, 124 aa, Homo sapiens
EVQLVESGGDLVHPGESLRLSCAASGFTFSGCAMHWVRQAPGKGLEYVSAISSNGDSTYYANSVKGRFTISRDNSKNTLYLQMGSLRAEDSAVYYCARVAPDTTMVRGGFFDFWGQGTLVTVSS

SEQ ID NO: 8415 - protein, 100 aa, Homo sapiens
EVQLVESGGDLVKPGRSLRLSCIGSGFTFGDYGMSWFRQAPGKGLEWLGFIRRRANDGTTEYAASVKGRFTVSRDDSKSIAYLQLTSLKTEDTAIYYCSR

SEQ ID NO: 8416 - protein, 123 aa, Homo sapiens
EVQLVESGGDLVKPGRSLRLSCIGSGFTFGDYGMSWFRQAPGKGLEWLGFIRRRANDGTTEYAASVKGRFTVSRDDSKSIAYLQLTSLKTEDTAIYYCSRSDGGYDREFFDYWGQGTLVTVSS

SEQ ID NO: 8417 - protein, 100 aa, Homo sapiens
EVQLVESGGDLVKSGGSLRLSCAASGFTFSNPWMSWVRQAPGKGLEWVGRIKSKTDGGTTDYAAPVKGRFTISRDGSKNTLYLQMNSLKTEDTAVYYCTT

SEQ ID NO: 8418 - protein, 121 aa, Homo sapiens
EVQLVESGGDLVKSGGSLRLSCAASGFTFSNPWMSWVRQAPGKGLEWVGRIKSKTDGGTTDYAAPVKGRFTISRDGSKNTLYLQMNSLKTEDTAVYYCTTGYSSGWSLGYWGQGTLVTVSS

SEQ ID NO: 8419 - protein, 97 aa, Homo sapiens
EVQLVESGGDLVQPGDSLRLSCVASGFTVSYYYMNWVRQAPGKGLEWVSAIHSDDSTYYADSVKGRFTISRDTSKNTLNLQMNSLRVEDTAVYYCAR

SEQ ID NO: 8420 - protein, 123 aa, Homo sapiens
EVQLVESGGDLVQPGDSLRLSCVASGFTVSYYYMNWVRQAPGKGLEWVSAIHSDDSTYYADSVKGRFTISRDTSKNTLNLQMNSLRVEDTAVYYCARVSGVPDYTALYFFDYWGQGTLVTVSS

SEQ ID NO: 8421 - protein, 99 aa, Homo sapiens
EVQLVESGGDLVQPGGSLRLSCAAFEFTFSDSAIHWVRQASGKGLEWVGRMRSKTKSYATAYAVSVKGRFTISRDDSKNTGYLQMNSLKTEDTAVYYCT

SEQ ID NO: 8422 - protein, 125 aa, Homo sapiens
EVQLVESGGDLVQPGGSLRLSCAAFEFTFSDSAIHWVRQASGKGLEWVGRMRSKTKSYATAYAVSVKGRFTISRDDSKNTGYLQMNSLKTEDTAVYYCTTTPLDYFESSGYHRSWGQGTLVTVSS

SEQ ID NO: 8423 - protein, 98 aa, Homo sapiens
EVQLVESGGDLVQPGGSLRLSCAASGFSLRSYWMIWVRQAPGKGLEWVANINQDVSHIYYLDSVRGRFTISRDNAENSLFLQMNSLTAEDTAVYYCAR

SEQ ID NO: 8424 - protein, 119 aa, Homo sapiens
EVQLVESGGDLVQPGGSLRLSCAASGFSLRSYWMIWVRQAPGKGLEWVANINQDVSHIYYLDSVRGRFTISRDNAENSLFLQMNSLTAEDTAVYYCARIEWEQWLVRYWGQGTLVTVSS

SEQ ID NO: 8425 - protein, 97 aa, Homo sapiens
EVQLVESGGDLVQPGGSLRLSCAASGFSVSRSYMNWVRQAPGKGLEWVSIIYSGGNAYYADSVKGRFTISRHNSKNTLYLQMNSLRPEDTAVYYCAR

SEQ ID NO: 8426 - protein, 117 aa, Homo sapiens
EVQLVESGGDLVQPGGSLRLSCAASGFSVSRSYMNWVRQAPGKGLEWVSIIYSGGNAYYADSVKGRFTISRHNSKNTLYLQMNSLRPEDTAVYYCARDNEEWAFDYWGQGTLVTVSS

SEQ ID NO: 8427 - protein, 98 aa, Homo sapiens
EVQLVESGGDLVQPGGSLRLSCAASGFTFSRYWMHWVRQTPGKGLVWVSRIIRDGTYTNYADSVKGRFTVSRDNAKSTVSLQMNSLRVEDTAIYYCVR

SEQ ID NO: 8428 - protein, 118 aa, Homo sapiens
EVQLVESGGDLVQPGGSLRLSCAASGFTFSRYWMHWVRQTPGKGLVWVSRIIRDGTYTNYADSVKGRFTVSRDNAKSTVSLQMNSLRVEDTAIYYCVRDGDAYNFDFWGQGTLVTVSP

SEQ ID NO: 8429 - protein, 98 aa, Homo sapiens
EVQLVESGGDLVQPGGSLRLSCAASGFTLRSYNMNWVRQAPGKGLEWISYISSSSSTMYYADSVKGRFTISRDNAKNSLYLQMNSLRAEDTAVYYCAR

SEQ ID NO: 8430 - protein, 118 aa, Homo sapiens
EVQLVESGGDLVQPGGSLRLSCAASGFTLRSYNMNWVRQAPGKGLEWISYISSSSSTMYYADSVKGRFTISRDNAKNSLYLQMNSLRAEDTAVYYCARDDSSGGFQSWGPGTLVTVSS

SEQ ID NO: 8431 - protein, 98 aa, Homo sapiens
EVQLVESGGDLVQPGGSLRLSCAASGFTLSSYEMNWVRQAPGKGLEWVSYISTTGNMVYYADSVKGRFTISRDNVKNSLYLQLSTLRVEDTAVYYCAR

SEQ ID NO: 8432 - protein, 125 aa, Homo sapiens
EVQLVESGGDLVQPGGSLRLSCAASGFTLSSYEMNWVRQAPGKGLEWVSYISTTGNMVYYADSVKGRFTISRDNVKNSLYLQLSTLRVEDTAVYYCARDKSREQWVIRPDAFDIWGQGTMVTVSS

SEQ ID NO: 8433 - protein, 97 aa, Homo sapiens
EVQLVESGGDLVQPGGSLRLSCAASGFTVSSYYMSWVRQAPGKGLEWVSVIYSGDSTYYADSVKGRFTISRDNSKNTLYLQMNSLRAEDTAVYYCAR

SEQ ID NO: 8434 - protein, 120 aa, Homo sapiens
EVQLVESGGDLVQPGGSLRLSCAASGFTVSSYYMSWVRQAPGKGLEWVSVIYSGDSTYYADSVKGRFTISRDNSKNTLYLQMNSLRAEDTAVYYCARAPIVGARSYFDYWGQGTLVTVSS

SEQ ID NO: 8435 - protein, 97 aa, Homo sapiens
EVQLVESGGDLVQPGGSLRLSCAASGLAFSSYWMHWVRQAPGKGLVWVSRISPDGRTTNYADSVKGRVTISRDNAKNTLFLQMTSLRAEDTALYYCI

SEQ ID NO: 8436 - protein, 120 aa, Homo sapiens
EVQLVESGGDLVQPGGSLRLSCAASGLAFSSYWMHWVRQAPGKGLVWVSRISPDGRTTNYADSVKGRVTISRDNAKNTLFLQMTSLRAEDTALYYCISAYGRNYGRFDPWGQGTLVTVSS

SEQ ID NO: 8437 - protein, 98 aa, Homo sapiens
EVQLVESGGDLVQPGGSLRLSCIASGFTFTNYWMTWVRLAPGKGLEWVANIKEDGSEKNYVDSVKGRFTISRDNTKNSLYLQMNSLRAEDTAVYYCAR

SEQ ID NO: 8438 - protein, 124 aa, Homo sapiens
EVQLVESGGDLVQPGGSLRLSCIASGFTFTNYWMTWVRLAPGKGLEWVANIKEDGSEKNYVDSVKGRFTISRDNTKNSLYLQMNSLRAEDTAVYYCARVKLYDRKDYYRHFDRWGQGTPVTVSS

SEQ ID NO: 8439 - protein, 98 aa, Homo sapiens
EVQLVESGGDLVQPGGSLRLSCVVSGFTFSTYSMNWVRQAPGKGLEWVSYISSSSLSRYYADSVKGRFTISRDNAKNSLSLQLNSLRAEDTAVYYCVR

SEQ ID NO: 8440 - protein, 122 aa, Homo sapiens
EVQLVESGGDLVQPGGSLRLSCVVSGFTFSTYSMNWVRQAPGKGLEWVSYISSSSLSRYYADSVKGRFTISRDNAKNSLSLQLNSLRAEDTAVYYCVRGSITWPTEYYLDYWGQGTLVTVSS

SEQ ID NO: 8441 - protein, 98 aa, Homo sapiens
EVQLVESGGDLVQPGGSLRVSCAASGFTFNNFAMTWVRQAPGKGLEWVASITESGDSTYYSDSVRGRFTISRDSSKNTLYLQMNSLRAEDTAVYYCAR

SEQ ID NO: 8442 - protein, 120 aa, Homo sapiens
EVQLVESGGDLVQPGGSLRVSCAASGFTFNNFAMTWVRQAPGKGLEWVASITESGDSTYYSDSVRGRFTISRDSSKNTLYLQMNSLRAEDTAVYYCARGTDSAATRVDAWGQGTTVTVSS

SEQ ID NO: 8443 - protein, 100 aa, Homo sapiens
EVQLVESGGDLVQPGRSLRLSCTTSGFTFDNSAVGWFRQAPGKGLEWVGFIRREAYGATTEYAASVKGRFTISRDDSKSIAYLQMNGLKSEDTAVYYCSR

SEQ ID NO: 8444 - protein, 126 aa, Homo sapiens
EVQLVESGGDLVQPGRSLRLSCTTSGFTFDNSAVGWFRQAPGKGLEWVGFIRREAYGATTEYAASVKGRFTISRDDSKSIAYLQMNGLKSEDTAVYYCSRGKEYDGNNYYRPFDFWGRGSLVTVSS

SEQ ID NO: 8445 - protein, 98 aa, Homo sapiens
EVQLVESGGDWVQPGGSLRLSCAVSGFRFSMYWMSWVRQAPGKGLEWVANIKEDGGKIVYVDSVKGRFTISRDNAKDSLFLQMNSVRAEDTAVYYCAR

SEQ ID NO: 8446 - protein, 123 aa, Homo sapiens
EVQLVESGGDWVQPGGSLRLSCAVSGFRFSMYWMSWVRQAPGKGLEWVANIKEDGGKIVYVDSVKGRFTISRDNAKDSLFLQMNSVRAEDTAVYYCARDPYNRNDGGFGMDVWGQGTTVTVSS

SEQ ID NO: 8447 - protein, 98 aa, Homo sapiens
EVQLVESGGGFIQPGGTLRLSCAASGFTFSRYGMSWVRQAPGKGLEWVSGFSGSGSSTYYADSVKGRFTISRDNSKNTLFLQMNNLRVEDTAVYYCAK

SEQ ID NO: 8448 - protein, 123 aa, Homo sapiens
EVQLVESGGGFIQPGGTLRLSCAASGFTFSRYGMSWVRQAPGKGLEWVSGFSGSGSSTYYADSVKGRFTISRDNSKNTLFLQMNNLRVEDTAVYYCAKDGDYRIPLAGSFDYWGQGILVSVSS

SEQ ID NO: 8449 - protein, 100 aa, Homo sapiens
EVQLVESGGGFVQPGRSLRLSCTTSGFTFSDYGLSWVRQTPDKGLQWVGFIRSKAYGGTTEYAASVNGRFTISRDDSKAIAYLELNSLKIEDSAVYYCTR

SEQ ID NO: 8450 - protein, 126 aa, Homo sapiens
EVQLVESGGGFVQPGRSLRLSCTTSGFTFSDYGLSWVRQTPDKGLQWVGFIRSKAYGGTTEYAASVNGRFTISRDDSKAIAYLELNSLKIEDSAVYYCTRDPILILRGGVIGHDYWGHGTLVTVSS

SEQ ID NO: 8451 - protein, 98 aa, Homo sapiens
EVQLVESGGGFVVPGGSLRLSCAASGFRFSNFAMNWVRQAPGKGLEWISYIRINGGNDYYAESVKGRFTISIDLAKNSAYLQMNSLRHEDSGVYYCAR

SEQ ID NO: 8452 - protein, 121 aa, Homo sapiens
EVQLVESGGGFVVPGGSLRLSCAASGFRFSNFAMNWVRQAPGKGLEWISYIRINGGNDYYAESVKGRFTISIDLAKNSAYLQMNSLRHEDSGVYYCARDRDNSGWYLGDSWGQGTLVTVSS

SEQ ID NO: 8453 - protein, 98 aa, Homo sapiens
EVQLVESGGGLAQPGGSLRLSCAASGFSFSTSSMNWVRQAPGMGLEWISYISDSTGSVYYADSVEGRFTVSRDNAKNSLYLQMNSLRAEDTAVYYCAR

SEQ ID NO: 8454 - protein, 120 aa, Homo sapiens
EVQLVESGGGLAQPGGSLRLSCAASGFSFSTSSMNWVRQAPGMGLEWISYISDSTGSVYYADSVEGRFTVSRDNAKNSLYLQMNSLRAEDTAVYYCARDNWNDAVDRDYWGRGTLVTVSS

SEQ ID NO: 8455 - protein, 98 aa, Homo sapiens
EVQLVESGGGLAQPGGSLRLSCVASGFSFSNSWMSWVRQAPGKGLEWVANMKHDGSEKYYLDSVKGRFTISRDNAKNSLYLQMNSLRAEDTAVYYCAR

SEQ ID NO: 8456 - protein, 118 aa, Homo sapiens
EVQLVESGGGLAQPGGSLRLSCVASGFSFSNSWMSWVRQAPGKGLEWVANMKHDGSEKYYLDSVKGRFTISRDNAKNSLYLQMNSLRAEDTAVYYCARDMAVGASDIWGQGTMVTVSS

SEQ ID NO: 8457 - protein, 98 aa, Homo sapiens
EVQLVESGGGLAQPGGTLRLSCAASGFTFNTYGMRWVRQAPGKGLEWVSDISGSGGSTYYADSVKGRFTISRDNSKRTLYLQMNSLRAEDTAVYYCAK

SEQ ID NO: 8458 - protein, 123 aa, Homo sapiens
EVQLVESGGGLAQPGGTLRLSCAASGFTFNTYGMRWVRQAPGKGLEWVSDISGSGGSTYYADSVKGRFTISRDNSKRTLYLQMNSLRAEDTAVYYCAKDYSTFIPMAGASDYWGQGTLVTVSS

SEQ ID NO: 8459 - protein, 100 aa, Homo sapiens
EVQLVESGGGLAQPGRSLRLSCTASGFSLGDYGMTWVRQAPGKGLEWVAFIRSKSYGGTAEYAASVQGRFTISRDDSKSIVYLQMNSLKREDTAIYYCTR

SEQ ID NO: 8460 - protein, 127 aa, Homo sapiens
EVQLVESGGGLAQPGRSLRLSCTASGFSLGDYGMTWVRQAPGKGLEWVAFIRSKSYGGTAEYAASVQGRFTISRDDSKSIVYLQMNSLKREDTAIYYCTRDLSLGRLLRSTDGLDVWGQGTTVTVSS

SEQ ID NO: 8461 - protein, 98 aa, Homo sapiens
EVQLVESGGGLEQPGRSLRLSCAASGFTFDDYAMHWVRQAPGKGLEWVSGISWNSGSIDYADSVKGRFTISRDNAKNSLYLQMNSLRAEDTAFYYCAK

SEQ ID NO: 8462 - protein, 123 aa, Homo sapiens
EVQLVESGGGLEQPGRSLRLSCAASGFTFDDYAMHWVRQAPGKGLEWVSGISWNSGSIDYADSVKGRFTISRDNAKNSLYLQMNSLRAEDTAFYYCAKAGGGFLEWVLYLDDWGQGTLVTVSS

SEQ ID NO: 8463 - protein, 100 aa, Homo sapiens
EVQLVESGGGLEQPGRSLRLSCTTSGFTFGDFAMSWVRQAPGKGLEWVGFIRRKTHGGTTEYAASVKGRFTISRDDSKSIAYLQMDSLTTEDTAVYYCTR

SEQ ID NO: 8464 - protein, 122 aa, Homo sapiens
EVQLVESGGGLEQPGRSLRLSCTTSGFTFGDFAMSWVRQAPGKGLEWVGFIRRKTHGGTTEYAASVKGRFTISRDDSKSIAYLQMDSLTTEDTAVYYCTRDWTGSYFRKDYWGQGTLVTVSS

SEQ ID NO: 8465 - protein, 98 aa, Homo sapiens
EVQLVESGGGLGQPGRSLRLSCAASGFTFENYVMHWVRQAPGEGLEWVSGISWNSATIVYADSVKGRFTISRDNRKNSLYLEMNSLRSEDTALYYCAK

SEQ ID NO: 8466 - protein, 122 aa, Homo sapiens
EVQLVESGGGLGQPGRSLRLSCAASGFTFENYVMHWVRQAPGEGLEWVSGISWNSATIVYADSVKGRFTISRDNRKNSLYLEMNSLRSEDTALYYCAKGGDILTGRTRFDYWGQGTLVTVSS

SEQ ID NO: 8467 - protein, 97 aa, Homo sapiens
EVQLVESGGGLIQPGGSLRLSCAASGFNVSSDYMNWVRQAPVKGLEWVSVIYRGGTTYYADSVKGRFTISRDNSKNMLFLQMNSLRVEDTAVYYCAR

SEQ ID NO: 8468 - protein, 117 aa, Homo sapiens
EVQLVESGGGLIQPGGSLRLSCAASGFNVSSDYMNWVRQAPVKGLEWVSVIYRGGTTYYADSVKGRFTISRDNSKNMLFLQMNSLRVEDTAVYYCARASSWNVFDIWGQGTMVTVSS

SEQ ID NO: 8469 - protein, 97 aa, Homo sapiens
EVQLVESGGGLIQPGGSLRLSCAASGFSFSHSYLSWVRQAPGKGLEWVSSMHIGDSTYYAESVKGRFTISKDNSKNTLHLQMNNLRAEDTAVYYCAR

SEQ ID NO: 8470 - protein, 123 aa, Homo sapiens
EVQLVESGGGLIQPGGSLRLSCAASGFSFSHSYLSWVRQAPGKGLEWVSSMHIGDSTYYAESVKGRFTISKDNSKNTLHLQMNNLRAEDTAVYYCARDPGFGGAAGNNWFDPWGRGTQVIVSS

SEQ ID NO: 8471 - protein, 97 aa, Homo sapiens
EVQLVESGGGLIQPGGSLRLSCAASGFTFDTYEMNWVRQAPGKGLEWVSYINSSSTNIHYADSVKGRFTISRDNAKNSLYLQMNNLRVEDTAVYYCA

SEQ ID NO: 8472 - protein, 121 aa, Homo sapiens
EVQLVESGGGLIQPGGSLRLSCAASGFTFDTYEMNWVRQAPGKGLEWVSYINSSSTNIHYADSVKGRFTISRDNAKNSLYLQMNNLRVEDTAVYYCASTYYSTTSGYLHHWGQGTLVTVSS

SEQ ID NO: 8473 - protein, 97 aa, Homo sapiens
EVQLVESGGGLIQPGGSLRLSCAASGFTVSKNYMSWVRQAPGEGLEWVSLIYSGGLTYYIDSVKGRFTISRDNSKNTLYLQMDSLRAEDTAVYYCAR

SEQ ID NO: 8474 - protein, 116 aa, Homo sapiens
EVQLVESGGGLIQPGGSLRLSCAASGFTVSKNYMSWVRQAPGEGLEWVSLIYSGGLTYYIDSVKGRFTISRDNSKNTLYLQMDSLRAEDTAVYYCARDGGYGMDVWGQGTTVTVSS

SEQ ID NO: 8475 - protein, 97 aa, Homo sapiens
EVQLVESGGGLIQPGGSLRLSCAASGFTVSSKYMSWVRQAPGKGLEWVSVIYSGDITYYSNSVRGRFTISRDNSRNTLYLQMNSLRAEDTAVYYCAR

SEQ ID NO: 8476 - protein, 119 aa, Homo sapiens
EVQLVESGGGLIQPGGSLRLSCAASGFTVSSKYMSWVRQAPGKGLEWVSVIYSGDITYYSNSVRGRFTISRDNSRNTLYLQMNSLRAEDTAVYYCARGTDSAATRVDAWGQGTTVTVSS

SEQ ID NO: 8477 - protein, 97 aa, Homo sapiens
EVQLVESGGGLIQPGGSLRLSCAASGFTVSSNYMSWVRQAPGKGLEWVSVIYSGGSTYYADSVKGRFTISRDNSKNTLYLQMNSLRAEDTALYYCAR

SEQ ID NO: 8478 - protein, 121 aa, Homo sapiens
EVQLVESGGGLIQPGGSLRLSCAASGFTVSSNYMSWVRQAPGKGLEWVSVIYSGGSTYYADSVKGRFTISRDNSKNTLYLQMNSLRAEDTALYYCARSYYGGNSDAQIDYWGQGTLVTVSS

SEQ ID NO: 8479 - protein, 98 aa, Homo sapiens
EVQLVESGGGLIQPGGSLRLSCAGSGFTLSTYGMYWVRQAPGKGLEWVSSMSFSGGSTYYTDSVKGRFTISRDISKNTLYLQMNSLRVEDTAVYYCAK

SEQ ID NO: 8480 - protein, 123 aa, Homo sapiens
EVQLVESGGGLIQPGGSLRLSCAGSGFTLSTYGMYWVRQAPGKGLEWVSSMSFSGGSTYYTDSVKGRFTISRDISKNTLYLQMNSLRVEDTAVYYCAKELSRNIAIGGTLGQWGQGTLVTVSS

SEQ ID NO: 8481 - protein, 97 aa, Homo sapiens
EVQLVESGGGLIQPGGSVRLSCAVSGFTVSSNYVTWVRQAPGKGLEWVSSIYSGGNTFYADSVRGRFTISRDNSQNTVFLQMNSLRVEDTAMYYCAR

SEQ ID NO: 8482 - protein, 125 aa, Homo sapiens
EVQLVESGGGLIQPGGSVRLSCAVSGFTVSSNYVTWVRQAPGKGLEWVSSIYSGGNTFYADSVRGRFTISRDNSQNTVFLQMNSLRVEDTAMYYCARDRLGRRDSGTYYRCLDLWGRGTPVSVTS

SEQ ID NO: 8483 - protein, 98 aa, Homo sapiens
EVQLVESGGGLIQPGGTRRLSCAASGFAFVNYGLSWVRQAPGKGLEWVSFISGSGLSTYYADSVKGRFTISRDNSRKTLYLQMNSLRAEDTALYYCVK

SEQ ID NO: 8484 - protein, 123 aa, Homo sapiens
EVQLVESGGGLIQPGGTRRLSCAASGFAFVNYGLSWVRQAPGKGLEWVSFISGSGLSTYYADSVKGRFTISRDNSRKTLYLQMNSLRAEDTALYYCVKDADYRVPMTGSFDSWGQGTPVTVSS

SEQ ID NO: 8485 - protein, 99 aa, Homo sapiens
EVQLVESGGGLIQPGRSLRLSCAASGFSFEDYAMNWVRQAPGKGLEWVSGISWDSGAIGYADSVKGRFTISRDNAKKSLYLQMRSLRVEDTAFYYCAKA

SEQ ID NO: 8486 - protein, 119 aa, Homo sapiens
EVQLVESGGGLIQPGRSLRLSCAASGFSFEDYAMNWVRQAPGKGLEWVSGISWDSGAIGYADSVKGRFTISRDNAKKSLYLQMRSLRVEDTAFYYCAKANGAGSYSVSWGQGTLVTVSS

SEQ ID NO: 8487 - protein, 98 aa, Homo sapiens
EVQLVESGGGLLQPGGSLRLSCAASGFNFSSYEMNWVRQAPGKGLEWVSYISSGGDTKNYADSVKGRFTISRDNAKNSLYLQMNSLRAEDTAVYYCAR

SEQ ID NO: 8488 - protein, 116 aa, Homo sapiens
EVQLVESGGGLLQPGGSLRLSCAASGFNFSSYEMNWVRQAPGKGLEWVSYISSGGDTKNYADSVKGRFTISRDNAKNSLYLQMNSLRAEDTAVYYCARDAPLIDYWGQGTLVTVSS

SEQ ID NO: 8489 - protein, 100 aa, Homo sapiens
EVQLVESGGGLVEPGGSLRLSCAASGFTFNNAWMTWVRQAPGKGLEWVGRIKTKTDGGTTDYAVPVKGRFTISRDDSRNTLYLQMNSLRAEDTAVYYCTT

SEQ ID NO: 8490 - protein, 122 aa, Homo sapiens
EVQLVESGGGLVEPGGSLRLSCAASGFTFNNAWMTWVRQAPGKGLEWVGRIKTKTDGGTTDYAVPVKGRFTISRDDSRNTLYLQMNSLRAEDTAVYYCTTESPTMVQGWYYWGQGTLVTVSS

SEQ ID NO: 8491 - protein, 98 aa, Homo sapiens
EVQLVESGGGLVHPGGSLRLSCAASGFTFSSYSMTWVRQAPGKGPEWVANIKEDGSEIYYVDSVKGRFTISRDKSKYSLDLQMNSLRAEDTAVYYCAR

SEQ ID NO: 8492 - protein, 123 aa, Homo sapiens
EVQLVESGGGLVHPGGSLRLSCAASGFTFSSYSMTWVRQAPGKGPEWVANIKEDGSEIYYVDSVKGRFTISRDKSKYSLDLQMNSLRAEDTAVYYCARNLLYESSTYRPLDYWGQGTLVTVSS

SEQ ID NO: 8493 - protein, 98 aa, Homo sapiens
EVQLVESGGGLVHPGGSLRLSCAASGFTFSSYWMSWVRQAPGKGLEWVANIKQDGSEKYYVDSVKGRFTISRDNAKNSLYLQMNSLRAEDTAVYYCAR

SEQ ID NO: 8494 - protein, 124 aa, Homo sapiens
EVQLVESGGGLVHPGGSLRLSCAASGFTFSSYWMSWVRQAPGKGLEWVANIKQDGSEKYYVDSVKGRFTISRDNAKNSLYLQMNSLRAEDTAVYYCARLMIAVTGSQEVFPGYWGQGTLVTVSS

SEQ ID NO: 8495 - protein, 97 aa, Homo sapiens
EVQLVESGGGLVHPGGSLRLSCEASGFTVSDNYMSWVRQAPGGGLEWVSVIHTSGVTNYADSIKGRFTISRDNSRNTLYLQMNSLRAEDTAVYYCAR

SEQ ID NO: 8496 - protein, 119 aa, Homo sapiens
EVQLVESGGGLVHPGGSLRLSCEASGFTVSDNYMSWVRQAPGGGLEWVSVIHTSGVTNYADSIKGRFTISRDNSRNTLYLQMNSLRAEDTAVYYCARGTDSAATRVDAWGQGTTVTVSS

SEQ ID NO: 8497 - protein, 98 aa, Homo sapiens
EVQLVESGGGLVHPGGSLRLSCVASGFTFSTYSMNWVRQAPGKGLEWVSYISSSSLSIYYADSVKGRFTISRDNAKNSLYLQMNSLRAEDTAVYYCAR

SEQ ID NO: 8498 - protein, 123 aa, Homo sapiens
EVQLVESGGGLVHPGGSLRLSCVASGFTFSTYSMNWVRQAPGKGLEWVSYISSSSLSIYYADSVKGRFTISRDNAKNSLYLQMNSLRAEDTAVYYCARVGGVLGASLGRNDYWGQGTLVTVSS

SEQ ID NO: 8499 - protein, 96 aa, Homo sapiens
EVQLVESGGGLVHPGGSLRLSCVTSGFTFSNFWMNWVRQAPGKGLEWVAHIREDGSEKAYVDAVKGRFIVSRDNAKNTLYLEMNSLRPEDTALYFC

SEQ ID NO: 8500 - protein, 115 aa, Homo sapiens
EVQLVESGGGLVHPGGSLRLSCVTSGFTFSNFWMNWVRQAPGKGLEWVAHIREDGSEKAYVDAVKGRFIVSRDNAKNTLYLEMNSLRPEDTALYFCRVGHWSNSWGQGTLVTVSS

SEQ ID NO: 8501 - protein, 98 aa, Homo sapiens
EVQLVESGGGLVKAGGSLRLSCAASGFTFNTSTMNWVRQAPGKGLEWVSSISRSSSYIFYADSVEGRFTISRDNAKNSLYLQMNTLRAEDTAVYYCAR

SEQ ID NO: 8502 - protein, 126 aa, Homo sapiens
EVQLVESGGGLVKAGGSLRLSCAASGFTFNTSTMNWVRQAPGKGLEWVSSISRSSSYIFYADSVEGRFTISRDNAKNSLYLQMNTLRAEDTAVYYCARDGEYCSGTSCYVKYMDVWGKGTTVTVSS

SEQ ID NO: 8503 - protein, 98 aa, Homo sapiens
EVQLVESGGGLVKPGGSLRISCAASGFIFSNYGMNWVRQAPGKGLEWVSSISGSSIYRYYAESVKGRVTISRDNAKNSLYLQMNSLRVEDTAVYYCAR

SEQ ID NO: 8504 - protein, 123 aa, Homo sapiens
EVQLVESGGGLVKPGGSLRISCAASGFIFSNYGMNWVRQAPGKGLEWVSSISGSSIYRYYAESVKGRVTISRDNAKNSLYLQMNSLRVEDTAVYYCARERYDSSGNYYGMDVWGQGTTVTVSS

SEQ ID NO: 8505 - protein, 98 aa, Homo sapiens
EVQLVESGGGLVKPGGSLRLSCAASGFRFTNVWMNWVRQAPGKGLEWVGRIKNDGGTTDYAAPVRGRFAISRDDSKNTLYLQMNSLKTEDTAVYYCTT

SEQ ID NO: 8506 - protein, 122 aa, Homo sapiens
EVQLVESGGGLVKPGGSLRLSCAASGFRFTNVWMNWVRQAPGKGLEWVGRIKNDGGTTDYAAPVRGRFAISRDDSKNTLYLQMNSLKTEDTAVYYCTTDLEVVEVTSLLGYWGQGTLVTVSS

SEQ ID NO: 8507 - protein, 98 aa, Homo sapiens
EVQLVESGGGLVKPGGSLRLSCAASGFSFSKYGMNWVRQAPGKGLEWVSSISGSGLSIYYADSMKGRFTISRDNAKNSLYLQMNSLRAEDTAVYFCTR

SEQ ID NO: 8508 - protein, 124 aa, Homo sapiens
EVQLVESGGGLVKPGGSLRLSCAASGFSFSKYGMNWVRQAPGKGLEWVSSISGSGLSIYYADSMKGRFTISRDNAKNSLYLQMNSLRAEDTAVYFCTRHQSEYSGYGRGVDGYWGQGTLVTVSS

SEQ ID NO: 8509 - protein, 98 aa, Homo sapiens
EVQLVESGGGLVKPGGSLRLSCAASGFTFNSYTMNWVRQAPGKGLEWVASIGTSAGYISYAGSVKGRFTISRDNARNSLFLQMNSLRAEDTAVYYCAR

SEQ ID NO: 8510 - protein, 125 aa, Homo sapiens
EVQLVESGGGLVKPGGSLRLSCAASGFTFNSYTMNWVRQAPGKGLEWVASIGTSAGYISYAGSVKGRFTISRDNARNSLFLQMNSLRAEDTAVYYCAREGGYYSGSETYGVFDFWGRGTLVTVSS

SEQ ID NO: 8511 - protein, 100 aa, Homo sapiens
EVQLVESGGGLVKPGGSLRLSCAASGFTFSDAWMNWVRQAPGKGLEWVGRIKSKTDGGTTNYAAPVKDRFTISRDDSKTTLYLQMNSLKTEDTAVYYCTT

SEQ ID NO: 8512 - protein, 117 aa, Homo sapiens
EVQLVESGGGLVKPGGSLRLSCAASGFTFSDAWMNWVRQAPGKGLEWVGRIKSKTDGGTTNYAAPVKDRFTISRDDSKTTLYLQMNSLKTEDTAVYYCTTFGSRGYWGQGTLVTVSS

SEQ ID NO: 8513 - protein, 100 aa, Homo sapiens
EVQLVESGGGLVKPGGSLRLSCAASGFTFSDAWMTWVRQAPGKGLEWVGRIKSKIDGGTTDYPAPVKGRFTISRDDSKNTLYLQMNSLKTEDTAVYYCTT

SEQ ID NO: 8514 - protein, 125 aa, Homo sapiens
EVQLVESGGGLVKPGGSLRLSCAASGFTFSDAWMTWVRQAPGKGLEWVGRIKSKIDGGTTDYPAPVKGRFTISRDDSKNTLYLQMNSLKTEDTAVYYCTTLKYCGADCRFVFEYWGQGTLVTVSS

SEQ ID NO: 8515 - protein, 100 aa, Homo sapiens
EVQLVESGGGLVKPGGSLRLSCAASGFTFSNAWMNWVRQTPGKGLEWVGRFKTYTDGGTTDYAAPVKGRFTISRDDSKNTLYLQMNSLKIEDTGVYFCST

SEQ ID NO: 8516 - protein, 125 aa, Homo sapiens
EVQLVESGGGLVKPGGSLRLSCAASGFTFSNAWMNWVRQTPGKGLEWVGRFKTYTDGGTTDYAAPVKGRFTISRDDSKNTLYLQMNSLKIEDTGVYFCSTGWNDFGCCEDAFDIWGQGTMVTVSS

SEQ ID NO: 8517 - protein, 100 aa, Homo sapiens
EVQLVESGGGLVKPGGSLRLSCAASGFTFSNAWMSWVRQAPGKGLEWVGRIKSKTDGGTTDYAAPVKGRFTISRDDSKNTLYLQMNSLKTEDTAVYYCTT

SEQ ID NO: 8518 - protein, 126 aa, Homo sapiens
EVQLVESGGGLVKPGGSLRLSCAASGFTFSNAWMSWVRQAPGKGLEWVGRIKSKTDGGTTDYAAPVKGRFTISRDDSKNTLYLQMNSLKTEDTAVYYCTTDLQQWLVRDHVAFDIWGQGTMVTVSS

SEQ ID NO: 8519 - protein, 125 aa, Homo sapiens
EVQLVESGGGLVKPGGSLRLSCAASGFTFSNAWMSWVRQAPGKGLEWVGRIKSKTDGGTTDYAAPVKGRFTISRDDSKNTLYLQMNSLKTEDTAVYYCTTDQLLLWFGELLLSYWGQGTLVTVSS

SEQ ID NO: 8520 - protein, 125 aa, Homo sapiens
EVQLVESGGGLVKPGGSLRLSCAASGFTFSNAWMSWVRQAPGKGLEWVGRIKSKTDGGTTDYAAPVKGRFTISRDDSKNTLYLQMNSLKTEDTAVYYCTTDRDSGSYLKGLLRYWGQGTLVTVSS

SEQ ID NO: 8521 - protein, 121 aa, Homo sapiens
EVQLVESGGGLVKPGGSLRLSCAASGFTFSNAWMSWVRQAPGKGLEWVGRIKSKTDGGTTDYAAPVKGRFTISRDDSKNTLYLQMNSLKTEDTAVYYCTTDYEGYSYGTHWGQGTLVTVSS

SEQ ID NO: 8522 - protein, 100 aa, Homo sapiens
EVQLVESGGGLVKPGGSLRLSCAASGFTFSNTWMSWVRQAPGKGLEWVGHIRSKADGGKTDFAAPLKGRFIISRDDSKDTLYLQINSLKTEDTAVYYCCT

SEQ ID NO: 8523 - protein, 124 aa, Homo sapiens
EVQLVESGGGLVKPGGSLRLSCAASGFTFSNTWMSWVRQAPGKGLEWVGHIRSKADGGKTDFAAPLKGRFIISRDDSKDTLYLQINSLKTEDTAVYYCCTEGSRGFYFPGIDYWGQGTLVTVSS

SEQ ID NO: 8524 - protein, 98 aa, Homo sapiens
EVQLVESGGGLVKPGGSLRLSCAASGFTFSNYTMNWVRQAPGKGLEWVSSISTSSNYIYNAVSVKGRFTISRDNAKNSLYLQLNSLRAEDTAVFYCAR

SEQ ID NO: 8525 - protein, 126 aa, Homo sapiens
EVQLVESGGGLVKPGGSLRLSCAASGFTFSNYTMNWVRQAPGKGLEWVSSISTSSNYIYNAVSVKGRFTISRDNAKNSLYLQLNSLRAEDTAVFYCARDTMGDYGGLLRLGAFDIWGQGTMVTVSS

SEQ ID NO: 8526 - protein, 97 aa, Homo sapiens
EVQLVESGGGLVKPGGSLRLSCAASGFTFSSYSMNWVRQAPGKGLEWVSSISSSSSYIYYADSVKGRFTISRDNAKNSLYLQMNSLRAEDTAVYYCA

SEQ ID NO: 8527 - protein, 98 aa, Homo sapiens
EVQLVESGGGLVKPGGSLRLSCAASGFTFSSYSMNWVRQAPGKGLEWVSSISSSSSYIYYADSVKGRFTISRDNAKNSLYLQMNSLRAEDTAVYYCAR

SEQ ID NO: 8528 - protein, 121 aa, Homo sapiens
EVQLVESGGGLVKPGGSLRLSCAASGFTFSSYSMNWVRQAPGKGLEWVSSISSSSSYIYYADSVKGRFTISRDNAKNSLYLQMNSLRAEDTAVYYCARANRYNWNDVWHYWGQGTLVTVSS

SEQ ID NO: 8529 - protein, 120 aa, Homo sapiens
EVQLVESGGGLVKPGGSLRLSCAASGFTFSSYSMNWVRQAPGKGLEWVSSISSSSSYIYYADSVKGRFTISRDNAKNSLYLQMNSLRAEDTAVYYCARASLRRYSGYDLWGQGTLVTVSS

SEQ ID NO: 8530 - protein, 123 aa, Homo sapiens
EVQLVESGGGLVKPGGSLRLSCAASGFTFSSYSMNWVRQAPGKGLEWVSSISSSSSYIYYADSVKGRFTISRDNAKNSLYLQMNSLRAEDTAVYYCARDEQQLDYYYYYMDVWGKGTTVTVSS

SEQ ID NO: 8531 - protein, 127 aa, Homo sapiens
EVQLVESGGGLVKPGGSLRLSCAASGFTFSSYSMNWVRQAPGKGLEWVSSISSSSSYIYYADSVKGRFTISRDNAKNSLYLQMNSLRAEDTAVYYCARDLNRCSGGSCYYYYGMDVWGQGTTVTVSS

SEQ ID NO: 8532 - protein, 124 aa, Homo sapiens
EVQLVESGGGLVKPGGSLRLSCAASGFTFSSYSMNWVRQAPGKGLEWVSSISSSSSYIYYADSVKGRFTISRDNAKNSLYLQMNSLRAEDTAVYYCARDRGDYSPYYYYGMDVWGQGTTVTVSS

SEQ ID NO: 8533 - protein, 122 aa, Homo sapiens
EVQLVESGGGLVKPGGSLRLSCAASGFTFSSYSMNWVRQAPGKGLEWVSSISSSSSYIYYADSVKGRFTISRDNAKNSLYLQMNSLRAEDTAVYYCARDYPGIAVAGIFCYWGQGTLVTVSS

SEQ ID NO: 8534 - protein, 129 aa, Homo sapiens
EVQLVESGGGLVKPGGSLRLSCAASGFTFSSYSMNWVRQAPGKGLEWVSSISSSSSYIYYADSVKGRFTISRDNAKNSLYLQMNSLRAEDTAVYYCAREAYCGGDCPEQNYYYYYMDVWGKGTTVTVSS

SEQ ID NO: 8535 - protein, 126 aa, Homo sapiens
EVQLVESGGGLVKPGGSLRLSCAASGFTFSSYSMNWVRQAPGKGLEWVSSISSSSSYIYYADSVKGRFTISRDNAKNSLYLQMNSLRAEDTAVYYCAREETKGYCTNGVCYNFDYWGQGTLVTVSS

SEQ ID NO: 8536 - protein, 127 aa, Homo sapiens
EVQLVESGGGLVKPGGSLRLSCAASGFTFSSYSMNWVRQAPGKGLEWVSSISSSSSYIYYADSVKGRFTISRDNAKNSLYLQMNSLRAEDTAVYYCAREGRLGRGYSYGYNWYFDLWGRGTLVTVSS

SEQ ID NO: 8537 - protein, 121 aa, Homo sapiens
EVQLVESGGGLVKPGGSLRLSCAASGFTFSSYSMNWVRQAPGKGLEWVSSISSSSSYIYYADSVKGRFTISRDNAKNSLYLQMNSLRAEDTAVYYCARGGGAGRPHRPYIWGQGTMVTVSS

SEQ ID NO: 8538 - protein, 119 aa, Homo sapiens
EVQLVESGGGLVKPGGSLRLSCAASGFTFSSYSMNWVRQAPGKGLEWVSSISSSSSYIYYADSVKGRFTISRDNAKNSLYLQMNSLRAEDTAVYYCARGGVATIQTDYWGQGTLVTVSS

SEQ ID NO: 8539 - protein, 123 aa, Homo sapiens
EVQLVESGGGLVKPGGSLRLSCAASGFTFSSYSMNWVRQAPGKGLEWVSSISSSSSYIYYADSVKGRFTISRDNAKNSLYLQMNSLRAEDTAVYYCAVGTHYDSISYYGMDVWGQGTTVTVSS

SEQ ID NO: 8540 - protein, 98 aa, Homo sapiens
EVQLVESGGGLVKPGGSLRLSCAASGFTFSSYSMNWVRQAPGKGLEWVSSISSSTSYIYYADSMKGRFTISRDNAKNSLYLQMNSLRAEDTAVYYCAR

SEQ ID NO: 8541 - protein, 129 aa, Homo sapiens
EVQLVESGGGLVKPGGSLRLSCAASGFTFSSYSMNWVRQAPGKGLEWVSSISSSTSYIYYADSMKGRFTISRDNAKNSLYLQMNSLRAEDTAVYYCARVGPTEYQLLYTTRYYYYMDVWGKGTTVTVSS

SEQ ID NO: 8542 - protein, 98 aa, Homo sapiens
EVQLVESGGGLVKPGGSLRLSCAASGFTFSTYSMNWVRQAPGKGLEWVSSISSTSKYNYYADSMKGRFTISRDNAKNSLYLHMNSLRAEDTAVYYCAR

SEQ ID NO: 8543 - protein, 123 aa, Homo sapiens
EVQLVESGGGLVKPGGSLRLSCAASGFTFSTYSMNWVRQAPGKGLEWVSSISSTSKYNYYADSMKGRFTISRDNAKNSLYLHMNSLRAEDTAVYYCARGELPGDSVGYWFDSWGQGTLVTVSS

SEQ ID NO: 8544 - protein, 97 aa, Homo sapiens
EVQLVESGGGLVKPGGSLRLSCAASGFTLSSHNMNWVRQAPGRGLEWVASISHHATYTHVADALRDRFIISRDSRMNSLYLQLNRLTADDTATYYCA

SEQ ID NO: 8545 - protein, 127 aa, Homo sapiens
EVQLVESGGGLVKPGGSLRLSCAASGFTLSSHNMNWVRQAPGRGLEWVASISHHATYTHVADALRDRFIISRDSRMNSLYLQLNRLTADDTATYYCARGMSDPYCSTRICPSQLDAWGRGTLVIVSS

SEQ ID NO: 8546 - protein, 100 aa, Homo sapiens
EVQLVESGGGLVKPGGSLRLSCAASGVSFNNVWMSWVRQAPGKGLEWVGRIKSKTAGGTTDYAAPVKGRFFISTDDSKNTLYLQMNSLKSEDTAVYYCTT

SEQ ID NO: 8547 - protein, 133 aa, Homo sapiens
EVQLVESGGGLVKPGGSLRLSCAASGVSFNNVWMSWVRQAPGKGLEWVGRIKSKTAGGTTDYAAPVKGRFFISTDDSKNTLYLQMNSLKSEDTAVYYCTTESPTYLDILTDYYVPGRDAFDIWGQGTVVTVSS

SEQ ID NO: 8548 - protein, 98 aa, Homo sapiens
EVQLVESGGGLVKPGGSLRLSCSASGFTFSSYSMNWVRQAPGKGLEWVSSLSSRSTYLYYADSVKGRFTISRDNAENSLFLQMNSLSPEDTAMYFCAR

SEQ ID NO: 8549 - protein, 128 aa, Homo sapiens
EVQLVESGGGLVKPGGSLRLSCSASGFTFSSYSMNWVRQAPGKGLEWVSSLSSRSTYLYYADSVKGRFTISRDNAENSLFLQMNSLSPEDTAMYFCARASDRELRFLEWLSHEAFDIWGPGTMVTVSS

SEQ ID NO: 8550 - protein, 99 aa, Homo sapiens
EVQLVESGGGLVKPGGSLRLSCVASGFTFSTAWMSWVRQAPGKGLEWVGRIKTEIDGGTTDYAAPVKGRFTISRDDSKNTLYLQMNSLKTEDTAIYYCT

SEQ ID NO: 8551 - protein, 117 aa, Homo sapiens
EVQLVESGGGLVKPGGSLRLSCVASGFTFSTAWMSWVRQAPGKGLEWVGRIKTEIDGGTTDYAAPVKGRFTISRDDSKNTLYLQMNSLKTEDTAIYYCTVRSSFDPWGQGTLVTVSS

SEQ ID NO: 8552 - protein, 97 aa, Homo sapiens
EVQLVESGGGLVQAGGSLRLSCAVSGFTISDYGMSWVRQAPGKGLEWVSSITYSGGSTYYVDSVKGRYTISRVTSKNTLYLQMDRLRAEDTAVYYCV

SEQ ID NO: 8553 - protein, 124 aa, Homo sapiens
EVQLVESGGGLVQAGGSLRLSCAVSGFTISDYGMSWVRQAPGKGLEWVSSITYSGGSTYYVDSVKGRYTISRVTSKNTLYLQMDRLRAEDTAVYYCVKARVRNRIAEAGTFDSWGQGTLVTVSS

SEQ ID NO: 8554 - protein, 100 aa, Homo sapiens
EVQLVESGGGLVQAGRSLRLSCTASGFTFGDSAMSWVRQAPGKGLEWVGYIRSKAFGEKTDYAASVKGRFTISRDDSKSIAYLQMNSLKIEDTGVYFCAR

SEQ ID NO: 8555 - protein, 130 aa, Homo sapiens
EVQLVESGGGLVQAGRSLRLSCTASGFTFGDSAMSWVRQAPGKGLEWVGYIRSKAFGEKTDYAASVKGRFTISRDDSKSIAYLQMNSLKIEDTGVYFCARDGDVARFLEWLSKLDAFDMWGQGTMVTVSS

SEQ ID NO: 8556 - protein, 98 aa, Homo sapiens
EVQLVESGGGLVQAGRSLRLSCVASGFNFDDYAIQWVRQVPGKGLEWVAGISWNSGAVGYGDSVEGRVTISRDNAKNTVYLQINRLRPDDTAFYHCGR

SEQ ID NO: 8557 - protein, 120 aa, Homo sapiens
EVQLVESGGGLVQAGRSLRLSCVASGFNFDDYAIQWVRQVPGKGLEWVAGISWNSGAVGYGDSVEGRVTISRDNAKNTVYLQINRLRPDDTAFYHCGRAEYGSGSYGDFWGQGTLVTVSS

SEQ ID NO: 8558 - protein, 98 aa, Homo sapiens
EVQLVESGGGLVQKGGSLRLSCAASGFTFTTYAMSWVRQAPGEGLEWVASINKDGSKVYYVDSVKGRFTISRDNSKKMVFLQMNNVRAEDTALYYCAK

SEQ ID NO: 8559 - protein, 125 aa, Homo sapiens
EVQLVESGGGLVQKGGSLRLSCAASGFTFTTYAMSWVRQAPGEGLEWVASINKDGSKVYYVDSVKGRFTISRDNSKKMVFLQMNNVRAEDTALYYCAKDWVDSSDWASHPVFDSWGQGALVTGSS

SEQ ID NO: 8560 - protein, 97 aa, Homo sapiens
EVQLVESGGGLVQPGDSLRLSCVASGFTVSYYYMNWVRQAPGKGLEWVSALHSDDSTYYADSVKGRFTISRDTSKNTLYLQMNSLRAEDTAVYYCAR

SEQ ID NO: 8561 - protein, 119 aa, Homo sapiens
EVQLVESGGGLVQPGDSLRLSCVASGFTVSYYYMNWVRQAPGKGLEWVSALHSDDSTYYADSVKGRFTISRDTSKNTLYLQMNSLRAEDTAVYYCARGTDSAATRVDAWGQGTTVTVSS

SEQ ID NO: 8562 - protein, 98 aa, Homo sapiens
EVQLVESGGGLVQPGESLRLSCAASGFAFSNYGMSWVRQAPGKGLEWVSAVGGGPGNTYLADSVRGRFTMSRDNSKSTVYLQMDTLRAEDTAIYYCAK

SEQ ID NO: 8563 - protein, 125 aa, Homo sapiens
EVQLVESGGGLVQPGESLRLSCAASGFAFSNYGMSWVRQAPGKGLEWVSAVGGGPGNTYLADSVRGRFTMSRDNSKSTVYLQMDTLRAEDTAIYYCAKDWVNADDWPYQPVFDSWGQGTLVTVSS

SEQ ID NO: 8564 - protein, 98 aa, Homo sapiens
EVQLVESGGGLVQPGESLRLSCAASGFTFSRYAMHWVRQAPGKGLEYVSTISSNGGTTYYANSVSGRFTISRDNSKNTLFLQMGSLRAEDMAVYYCAR

SEQ ID NO: 8565 - protein, 129 aa, Homo sapiens
EVQLVESGGGLVQPGESLRLSCAASGFTFSRYAMHWVRQAPGKGLEYVSTISSNGGTTYYANSVSGRFTISRDNSKNTLFLQMGSLRAEDMAVYYCARDGGATYMVRRDILRDDAFDVWGQGTTVTVFS

SEQ ID NO: 8566 - protein, 98 aa, Homo sapiens
EVQLVESGGGLVQPGESLRLSCAASGFTFSSDSMNWVRQVPGKGLEWVSYINPKSDSTYYADSVKGRFTISRDNSKQSLYLQMNSLRDGDTAVYHCAR

SEQ ID NO: 8567 - protein, 119 aa, Homo sapiens
EVQLVESGGGLVQPGESLRLSCAASGFTFSSDSMNWVRQVPGKGLEWVSYINPKSDSTYYADSVKGRFTISRDNSKQSLYLQMNSLRDGDTAVYHCARGGESGWSLESWGQGTLVTVSS

SEQ ID NO: 8568 - protein, 98 aa, Homo sapiens
EVQLVESGGGLVQPGESLRLSCEASGFAFSSYGMSWVRQAPGKGLEWVSAVGGGRGNTYLADSVRGRFTMSRDNSKSMVYLQMDTLRAEDTAIYYCAK

SEQ ID NO: 8569 - protein, 125 aa, Homo sapiens
EVQLVESGGGLVQPGESLRLSCEASGFAFSSYGMSWVRQAPGKGLEWVSAVGGGRGNTYLADSVRGRFTMSRDNSKSMVYLQMDTLRAEDTAIYYCAKDWVNADDWAYQPVFDSWGQGTLVTVSS

SEQ ID NO: 8570 - protein, 98 aa, Homo sapiens
EVQLVESGGGLVQPGGSLGLSCAASGFTFSTYYMSWVRQAPGKGLEWVANIKEDGREKWYVDSVEGRATISRDNTKNSLYLQMNSLRVDDTAVYYCAR

SEQ ID NO: 8571 - protein, 120 aa, Homo sapiens
EVQLVESGGGLVQPGGSLGLSCAASGFTFSTYYMSWVRQAPGKGLEWVANIKEDGREKWYVDSVEGRATISRDNTKNSLYLQMNSLRVDDTAVYYCARAWDGNNGAFDIWGQGTMVTVSS

SEQ ID NO: 8572 - protein, 98 aa, Homo sapiens
EVQLVESGGGLVQPGGSLGLSCAVSGFTFSTYWMNWVRQAPGKGLEWVASIKQDGSETNYVDSVKGRFTISRDNAKNSLSLQMISLRADDTAVYYCAR

SEQ ID NO: 8573 - protein, 120 aa, Homo sapiens
EVQLVESGGGLVQPGGSLGLSCAVSGFTFSTYWMNWVRQAPGKGLEWVASIKQDGSETNYVDSVKGRFTISRDNAKNSLSLQMISLRADDTAVYYCARGPNTAYSHFDSWGQGTLVTVSS

SEQ ID NO: 8574 - protein, 98 aa, Homo sapiens
EVQLVESGGGLVQPGGSLRLPCVASGFTFSEYWMSWVRQAPGKGLEWVANIRQDGSEIYYADSVKGRFTISRDNAKNSLYLQMNSLRADDTAVYYCAR

SEQ ID NO: 8575 - protein, 130 aa, Homo sapiens
EVQLVESGGGLVQPGGSLRLPCVASGFTFSEYWMSWVRQAPGKGLEWVANIRQDGSEIYYADSVKGRFTISRDNAKNSLYLQMNSLRADDTAVYYCARTLMQRGIRGYDNGWGPYYFDSWGQGILVTVSS

SEQ ID NO: 8576 - protein, 98 aa, Homo sapiens
EVQLVESGGGLVQPGGSLRLSCAAPGFTFSSYAMSWVRQAPGKGLEWVSGISGSGGSTYYADSVKGRFTISRDNSKNTLYLQMNSLRVEDTAVYYCAK

SEQ ID NO: 8577 - protein, 123 aa, Homo sapiens
EVQLVESGGGLVQPGGSLRLSCAAPGFTFSSYAMSWVRQAPGKGLEWVSGISGSGGSTYYADSVKGRFTISRDNSKNTLYLQMNSLRVEDTAVYYCAKDGVDWRDYYYGLDVWGHGTTVTVAS

SEQ ID NO: 8578 - protein, 98 aa, Homo sapiens
EVQLVESGGGLVQPGGSLRLSCAASAFTFNNYEMNWVRQAPGKGLEWVSSISTSGSTIYYADSVKGRFTTSRDNARNSLYLRMNSLRAEDTAVYYCAR

SEQ ID NO: 8579 - protein, 122 aa, Homo sapiens
EVQLVESGGGLVQPGGSLRLSCAASAFTFNNYEMNWVRQAPGKGLEWVSSISTSGSTIYYADSVKGRFTTSRDNARNSLYLRMNSLRAEDTAVYYCARGVGGWLSYWYFDLWGRGTLLTVSS

SEQ ID NO: 8580 - protein, 97 aa, Homo sapiens
EVQLVESGGGLVQPGGSLRLSCAASELTVSNNYMSWVRQAPGKGLEWVSIIYSGGNTYYADSVKGRFTISRDNSKNTLYLQMNSVRAEDTAVYYCAR

SEQ ID NO: 8581 - protein, 120 aa, Homo sapiens
EVQLVESGGGLVQPGGSLRLSCAASELTVSNNYMSWVRQAPGKGLEWVSIIYSGGNTYYADSVKGRFTISRDNSKNTLYLQMNSVRAEDTAVYYCARDVPGSPGYYFDYWGQGTLVTVSS

SEQ ID NO: 8582 - protein, 98 aa, Homo sapiens
EVQLVESGGGLVQPGGSLRLSCAASGFDFSIYEMNWVRQAPGKGLEWVSYIGSSGNIIYYKDSVKGRFTISRDNAKNSLYLEMKSLRAEDTAVYYCAR

SEQ ID NO: 8583 - protein, 123 aa, Homo sapiens
EVQLVESGGGLVQPGGSLRLSCAASGFDFSIYEMNWVRQAPGKGLEWVSYIGSSGNIIYYKDSVKGRFTISRDNAKNSLYLEMKSLRAEDTAVYYCARETYSYGRYPRYFDYWGQGTLVTVSS

SEQ ID NO: 8584 - protein, 98 aa, Homo sapiens
EVQLVESGGGLVQPGGSLRLSCAASGFIFRSYWMAWVRQAPGKGLEWVANIKEDGTEEYYVDSVKGRFTVSRDNAKNSLFLQMNSLRVEDTAIYYCAR

SEQ ID NO: 8585 - protein, 122 aa, Homo sapiens
EVQLVESGGGLVQPGGSLRLSCAASGFIFRSYWMAWVRQAPGKGLEWVANIKEDGTEEYYVDSVKGRFTVSRDNAKNSLFLQMNSLRVEDTAIYYCARHIHNANSWYLGDFWGQGTLVAVSS

SEQ ID NO: 8586 - protein, 97 aa, Homo sapiens
EVQLVESGGGLVQPGGSLRLSCAASGFIFSSYAMHWVRQAPGKGLEYVSAISSNGGSTYYGNSVKGRFTISRDNSKNTLYLQMGSLRAEDMAVYYCA

SEQ ID NO: 8587 - protein, 119 aa, Homo sapiens
EVQLVESGGGLVQPGGSLRLSCAASGFIFSSYAMHWVRQAPGKGLEYVSAISSNGGSTYYGNSVKGRFTISRDNSKNTLYLQMGSLRAEDMAVYYCARRSGSRYYFDYWGQGTLVTVSS

SEQ ID NO: 8588 - protein, 98 aa, Homo sapiens
EVQLVESGGGLVQPGGSLRLSCAASGFIFTTYWMHWVRQAPGKGLVWVSRINIDGSSTTYADSVKGRFTISRDNTRNAVYLQMNSLRAEDTAVYYCAR

SEQ ID NO: 8589 - protein, 118 aa, Homo sapiens
EVQLVESGGGLVQPGGSLRLSCAASGFIFTTYWMHWVRQAPGKGLVWVSRINIDGSSTTYADSVKGRFTISRDNTRNAVYLQMNSLRAEDTAVYYCARDVVGATCDFWGQGTLVTVSS

SEQ ID NO: 8590 - protein, 98 aa, Homo sapiens
EVQLVESGGGLVQPGGSLRLSCAASGFNFNTYWMSWVRQAPGKGLEWVASIKQDGSEEKYVDSVKGRITISRDNAKNSVYLQMNSLRAEDTAVYYCVR

SEQ ID NO: 8591 - protein, 124 aa, Homo sapiens
EVQLVESGGGLVQPGGSLRLSCAASGFNFNTYWMSWVRQAPGKGLEWVASIKQDGSEEKYVDSVKGRITISRDNAKNSVYLQMNSLRAEDTAVYYCVRDFDYSDYGYSDWFDSWGPGTLVTVSS

SEQ ID NO: 8592 - protein, 98 aa, Homo sapiens
EVQLVESGGGLVQPGGSLRLSCAASGFPFSSYAMGWVRQAQGKGLEWVLGMSGSSGNTYYADPAKGRFSISRDNSKSTLFLQMNGLRGDDTAVYYCAK

SEQ ID NO: 8593 - protein, 122 aa, Homo sapiens
EVQLVESGGGLVQPGGSLRLSCAASGFPFSSYAMGWVRQAQGKGLEWVLGMSGSSGNTYYADPAKGRFSISRDNSKSTLFLQMNGLRGDDTAVYYCAKFAGSLRANWFINFWGRGTLVTVSS

SEQ ID NO: 8594 - protein, 98 aa, Homo sapiens
EVQLVESGGGLVQPGGSLRLSCAASGFRFSNFWMSWVRQAPGKGLEWVTDIKEDGSATYSVDSVKGRFTISRDNAKNLLYLQMNSLRAEDTAVYYCAR

SEQ ID NO: 8595 - protein, 121 aa, Homo sapiens
EVQLVESGGGLVQPGGSLRLSCAASGFRFSNFWMSWVRQAPGKGLEWVTDIKEDGSATYSVDSVKGRFTISRDNAKNLLYLQMNSLRAEDTAVYYCARDHSGGGSWHFDLWGRGTLVTVSS

SEQ ID NO: 8596 - protein, 98 aa, Homo sapiens
EVQLVESGGGLVQPGGSLRLSCAASGFSFSDYWMSWVRQAPGKGLEWLSDIKQDGSVKYFVDSVKGRFNISRDNAKNSLHLQMNSMRAEDTAVYYCAR

SEQ ID NO: 8597 - protein, 121 aa, Homo sapiens
EVQLVESGGGLVQPGGSLRLSCAASGFSFSDYWMSWVRQAPGKGLEWLSDIKQDGSVKYFVDSVKGRFNISRDNAKNSLHLQMNSMRAEDTAVYYCARDHHSGGSWHFDLWGRGTLVTVSS

SEQ ID NO: 8598 - protein, 98 aa, Homo sapiens
EVQLVESGGGLVQPGGSLRLSCAASGFSFSRFGMSWVRQAPGKGPEWVSSISDSGGSAHYTDSVKGRFTISRDNSRNTLYLQMNTLRAEDTAVYYCAK

SEQ ID NO: 8599 - protein, 124 aa, Homo sapiens
EVQLVESGGGLVQPGGSLRLSCAASGFSFSRFGMSWVRQAPGKGPEWVSSISDSGGSAHYTDSVKGRFTISRDNSRNTLYLQMNTLRAEDTAVYYCAKSITMIVVVVTYAFDIWGQGTMVTVSS

SEQ ID NO: 8600 - protein, 98 aa, Homo sapiens
EVQLVESGGGLVQPGGSLRLSCAASGFSFSRFWMDWVRQSPGKGLEWVSRIDFDGNVTTYADSVRGRFTISRDNAKNTLYLQMNSLRVEDTAVYYCVR

SEQ ID NO: 8601 - protein, 118 aa, Homo sapiens
EVQLVESGGGLVQPGGSLRLSCAASGFSFSRFWMDWVRQSPGKGLEWVSRIDFDGNVTTYADSVRGRFTISRDNAKNTLYLQMNSLRVEDTAVYYCVRDWSIIAFDIWGQGTVVTVSS

SEQ ID NO: 8602 - protein, 97 aa, Homo sapiens
EVQLVESGGGLVQPGGSLRLSCAASGFSFSSSWMDWVRQAPGKGLEWVATLRQDGSEIYYVDSVKGRFTISRDNAKSSLYLQMNSLRAEDTAVYYCA

SEQ ID NO: 8603 - protein, 115 aa, Homo sapiens
EVQLVESGGGLVQPGGSLRLSCAASGFSFSSSWMDWVRQAPGKGLEWVATLRQDGSEIYYVDSVKGRFTISRDNAKSSLYLQMNSLRAEDTAVYYCANLWEGGYWGQGTLVTVSS

SEQ ID NO: 8604 - protein, 96 aa, Homo sapiens
EVQLVESGGGLVQPGGSLRLSCAASGFSFSSSWMQWVRQVPGKGLVWVSRINSDGSSTDYADSVKGRFTVSRDNAKNTLYLQMNSLRDEDTAVYYC

SEQ ID NO: 8605 - protein, 117 aa, Homo sapiens
EVQLVESGGGLVQPGGSLRLSCAASGFSFSSSWMQWVRQVPGKGLVWVSRINSDGSSTDYADSVKGRFTVSRDNAKNTLYLQMNSLRDEDTAVYYCTKTGDFYYASWGQGALVTVSS

SEQ ID NO: 8606 - protein, 98 aa, Homo sapiens
EVQLVESGGGLVQPGGSLRLSCAASGFSFSSYAMSWVRQAPGKGLEWVAAISNSGNHLYYADSVKGRFTISRDNSEKTVFLQMDSLRAADTAVYYCAK

SEQ ID NO: 8607 - protein, 125 aa, Homo sapiens
EVQLVESGGGLVQPGGSLRLSCAASGFSFSSYAMSWVRQAPGKGLEWVAAISNSGNHLYYADSVKGRFTISRDNSEKTVFLQMDSLRAADTAVYYCAKDWIESGDWASHPVFDYWGQGALVSVSS

SEQ ID NO: 8608 - protein, 98 aa, Homo sapiens
EVQLVESGGGLVQPGGSLRLSCAASGFSISKYWMIWVRRAPGKGLEWVANIKQDGGEKHYVDSVKGRFTISRDNAKNSLYLQMNSLRVEDTGVYYCAK

SEQ ID NO: 8609 - protein, 118 aa, Homo sapiens
EVQLVESGGGLVQPGGSLRLSCAASGFSISKYWMIWVRRAPGKGLEWVANIKQDGGEKHYVDSVKGRFTISRDNAKNSLYLQMNSLRVEDTGVYYCAKDSSWNPPDYWGQGTLVTVSS

SEQ ID NO: 8610 - protein, 97 aa, Homo sapiens
EVQLVESGGGLVQPGGSLRLSCAASGFSVSNNYMSWVRQAPGKGLEWISVTYTGGSADYADSVKGRFTISRDNSKNTVYLQMNSLRVEDTAVYYCAR

SEQ ID NO: 8611 - protein, 115 aa, Homo sapiens
EVQLVESGGGLVQPGGSLRLSCAASGFSVSNNYMSWVRQAPGKGLEWISVTYTGGSADYADSVKGRFTISRDNSKNTVYLQMNSLRVEDTAVYYCAREGTYFDYWGQGTLVTVSS

SEQ ID NO: 8612 - protein, 98 aa, Homo sapiens
EVQLVESGGGLVQPGGSLRLSCAASGFTFDNCCMGWVRQTPGKGLEWVANIKKDGTEEYYVDSVKGRFTISRDNAKNSLYLQMNSLRAEDTALYYCAR

SEQ ID NO: 8613 - protein, 125 aa, Homo sapiens
EVQLVESGGGLVQPGGSLRLSCAASGFTFDNCCMGWVRQTPGKGLEWVANIKKDGTEEYYVDSVKGRFTISRDNAKNSLYLQMNSLRAEDTALYYCARGLPWDSSNSCYRPIDYWGQGTLVAVSS

SEQ ID NO: 8614 - protein, 98 aa, Homo sapiens
EVQLVESGGGLVQPGGSLRLSCAASGFTFDTYWMAWVRQAPGKGLEYVANIKYDGSEKYYVGSVKGRCTVSRDNAKNSVYLQMNSLTSEDTAVYYCVR

SEQ ID NO: 8615 - protein, 119 aa, Homo sapiens
EVQLVESGGGLVQPGGSLRLSCAASGFTFDTYWMAWVRQAPGKGLEYVANIKYDGSEKYYVGSVKGRCTVSRDNAKNSVYLQMNSLTSEDTAVYYCVRVIGGRYHADSWGRGTLVTVSS

SEQ ID NO: 8616 - protein, 98 aa, Homo sapiens
EVQLVESGGGLVQPGGSLRLSCAASGFTFDTYWMAWVRQAPGKGLEYVANIKYDGSEKYYVGSVKGRFTVSRDNAKNSLYLQMNGLTSEDTAIYYCAR

SEQ ID NO: 8617 - protein, 119 aa, Homo sapiens
EVQLVESGGGLVQPGGSLRLSCAASGFTFDTYWMAWVRQAPGKGLEYVANIKYDGSEKYYVGSVKGRFTVSRDNAKNSLYLQMNGLTSEDTAIYYCARVIGGRYHADYWGRGTLVTVSS

SEQ ID NO: 8618 - protein, 98 aa, Homo sapiens
EVQLVESGGGLVQPGGSLRLSCAASGFTFDTYWMAWVRQAPGKGLEYVANIKYDGSEKYYVGSVKGRFTVSRDNAKNSLYLQMNSLTSEDTAVYFCAR

SEQ ID NO: 8619 - protein, 119 aa, Homo sapiens
EVQLVESGGGLVQPGGSLRLSCAASGFTFDTYWMAWVRQAPGKGLEYVANIKYDGSEKYYVGSVKGRFTVSRDNAKNSLYLQMNSLTSEDTAVYFCARVIGGRYHADYWGRGTLVTVSS

SEQ ID NO: 8620 - protein, 97 aa, Homo sapiens
EVQLVESGGGLVQPGGSLRLSCAASGFTFGTYSMNWVRQAPGKGLEWVSYISSSSRPIYYADSVKGRFTISRDNAKNSLYLQMNSLRAEDTAVYYCA

SEQ ID NO: 8621 - protein, 124 aa, Homo sapiens
EVQLVESGGGLVQPGGSLRLSCAASGFTFGTYSMNWVRQAPGKGLEWVSYISSSSRPIYYADSVKGRFTISRDNAKNSLYLQMNSLRAEDTAVYYCARFAYCRSTNCPEAFDFWGQGTLVTVSS

SEQ ID NO: 8622 - protein, 98 aa, Homo sapiens
EVQLVESGGGLVQPGGSLRLSCAASGFTFNTYNMNWVRQAPGKGLEWVSYISSSSLSRYYADSVKGRFTISRDNAKNSLFLQMNSLRAEDTAVYYCAR

SEQ ID NO: 8623 - protein, 124 aa, Homo sapiens
EVQLVESGGGLVQPGGSLRLSCAASGFTFNTYNMNWVRQAPGKGLEWVSYISSSSLSRYYADSVKGRFTISRDNAKNSLFLQMNSLRAEDTAVYYCARGAQAGYSSFFPPTTFWGQGTLVTVSS

SEQ ID NO: 8624 - protein, 98 aa, Homo sapiens
EVQLVESGGGLVQPGGSLRLSCAASGFTFRSYWMSWVRQAPGKGLEWLARTNEDGSATHYVDSVRGRFTVSRDNAKNSLYLQMNSLRADDTALYYCAR

SEQ ID NO: 8625 - protein, 119 aa, Homo sapiens
EVQLVESGGGLVQPGGSLRLSCAASGFTFRSYWMSWVRQAPGKGLEWLARTNEDGSATHYVDSVRGRFTVSRDNAKNSLYLQMNSLRADDTALYYCARAPYVATMIDYWGQGTQVIVSS

SEQ ID NO: 8626 - protein, 98 aa, Homo sapiens
EVQLVESGGGLVQPGGSLRLSCAASGFTFSAYWMSWVRQAPGKGLEWVANIKQDGSDKYFMDSVKGRFTISRDNAKNSLYLQMNSLRVEDTAVYYCAR

SEQ ID NO: 8627 - protein, 126 aa, Homo sapiens
EVQLVESGGGLVQPGGSLRLSCAASGFTFSAYWMSWVRQAPGKGLEWVANIKQDGSDKYFMDSVKGRFTISRDNAKNSLYLQMNSLRVEDTAVYYCAREFEMYCRAGTCYWAYDSWGQGTLVTVSS

SEQ ID NO: 8628 - protein, 100 aa, Homo sapiens
EVQLVESGGGLVQPGGSLRLSCAASGFTFSDHDMDWVRQAPGKGLEWVGRTGIKDNNYVAQYAASVKGRFTISRDDSKNEVSLQMSSLKIEDTAIYYCAR

SEQ ID NO: 8629 - protein, 129 aa, Homo sapiens
EVQLVESGGGLVQPGGSLRLSCAASGFTFSDHDMDWVRQAPGKGLEWVGRTGIKDNNYVAQYAASVKGRFTISRDDSKNEVSLQMSSLKIEDTAIYYCARDGRGLYDTSDYRYYYMDVWGKGTTVTVSS

SEQ ID NO: 8630 - protein, 100 aa, Homo sapiens
EVQLVESGGGLVQPGGSLRLSCAASGFTFSDHYMDWVRQAPGKGLEWVGCIRNKANRATTEYAASVKGRFTISRDDSKKSLFLQMNSLKVEDTAIYYCVR

SEQ ID NO: 8631 - protein, 122 aa, Homo sapiens
EVQLVESGGGLVQPGGSLRLSCAASGFTFSDHYMDWVRQAPGKGLEWVGCIRNKANRATTEYAASVKGRFTISRDDSKKSLFLQMNSLKVEDTAIYYCVRSSVAPYWYFGLWGRGALVTVSS

SEQ ID NO: 8632 - protein, 97 aa, Homo sapiens
EVQLVESGGGLVQPGGSLRLSCAASGFTFSDYWMSWVRQAPGKGLEWVSYISSSSLSIYYADSVKGRFTSSRDNAKKSLYLQMNSLRAEDTAVYYCA

SEQ ID NO: 8633 - protein, 121 aa, Homo sapiens
EVQLVESGGGLVQPGGSLRLSCAASGFTFSDYWMSWVRQAPGKGLEWVSYISSSSLSIYYADSVKGRFTSSRDNAKKSLYLQMNSLRAEDTAVYYCARSSFGPYYYGMDVWGQGTTVTVSS

SEQ ID NO: 8634 - protein, 99 aa, Homo sapiens
EVQLVESGGGLVQPGGSLRLSCAASGFTFSGSVIHWVRQTSGTGLEWVGRIWTEVNSYATAYAASVSGRFTISRDDSMNTAYLQMNSLTTEDTAVYFCT

SEQ ID NO: 8635 - protein, 123 aa, Homo sapiens
EVQLVESGGGLVQPGGSLRLSCAASGFTFSGSVIHWVRQTSGTGLEWVGRIWTEVNSYATAYAASVSGRFTISRDDSMNTAYLQMNSLTTEDTAVYFCTRATGVAGGDLFDFWGQGTLVTVSS

SEQ ID NO: 8636 - protein, 98 aa, Homo sapiens
EVQLVESGGGLVQPGGSLRLSCAASGFTFSGYAMHWVRQVPGKGLEWVSSISGSGGSTYYADSVKGRFTISRDNSKNTLYLRLNSLRAGDTAVYSCAK

SEQ ID NO: 8637 - protein, 123 aa, Homo sapiens
EVQLVESGGGLVQPGGSLRLSCAASGFTFSGYAMHWVRQVPGKGLEWVSSISGSGGSTYYADSVKGRFTISRDNSKNTLYLRLNSLRAGDTAVYSCAKDRVVPTALHGYLDSWGQGTLVTVSS

SEQ ID NO: 8638 - protein, 98 aa, Homo sapiens
EVQLVESGGGLVQPGGSLRLSCAASGFTFSGYELNWVRQAPGKGLERISYISSGGDTMYYADSVKGRFTISRDNAKNSLYLQMNSLRAEDTAVYYCAR

SEQ ID NO: 8639 - protein, 116 aa, Homo sapiens
EVQLVESGGGLVQPGGSLRLSCAASGFTFSGYELNWVRQAPGKGLERISYISSGGDTMYYADSVKGRFTISRDNAKNSLYLQMNSLRAEDTAVYYCARGMTTIDSWGQGTLVTVSS

SEQ ID NO: 8640 - protein, 97 aa, Homo sapiens
EVQLVESGGGLVQPGGSLRLSCAASGFTFSIYSMHWVRQAPGKGLEYVSTISGNGGSTYYADSVKGRFTISRDNSKNTLHLQMGSLRIEDMAVYYCA

SEQ ID NO: 8641 - protein, 120 aa, Homo sapiens
EVQLVESGGGLVQPGGSLRLSCAASGFTFSIYSMHWVRQAPGKGLEYVSTISGNGGSTYYADSVKGRFTISRDNSKNTLHLQMGSLRIEDMAVYYCARTLNWGGDAFDIWGQGTMVTVSS

SEQ ID NO: 8642 - protein, 98 aa, Homo sapiens
EVQLVESGGGLVQPGGSLRLSCAASGFTFSNFGMNWVRQAPGKGLEWVSYISSSSLSTYYVDSVKGRFTISRDNAKNSLYLQMNSLRVEDTAVYYCAR

SEQ ID NO: 8643 - protein, 123 aa, Homo sapiens
EVQLVESGGGLVQPGGSLRLSCAASGFTFSNFGMNWVRQAPGKGLEWVSYISSSSLSTYYVDSVKGRFTISRDNAKNSLYLQMNSLRVEDTAVYYCARVGGAVGPTLGRNDYWGQGTLVTVSS

SEQ ID NO: 8644 - protein, 97 aa, Homo sapiens
EVQLVESGGGLVQPGGSLRLSCAASGFTFSNFWMHWVRQAPGKGLVWVSRINKDGTTTDYADSVKGRFTVSRDNAKNTLYLQMNGLRAGDTAVYYCV

SEQ ID NO: 8645 - protein, 119 aa, Homo sapiens
EVQLVESGGGLVQPGGSLRLSCAASGFTFSNFWMHWVRQAPGKGLVWVSRINKDGTTTDYADSVKGRFTVSRDNAKNTLYLQMNGLRAGDTAVYYCVNSVQRLQWYAFWGQGTLVTVSP

SEQ ID NO: 8646 - protein, 98 aa, Homo sapiens
EVQLVESGGGLVQPGGSLRLSCAASGFTFSNHWMSWVRQAPGKGLEWVANINRDGSETYYVDSVKGRFTISRDNAKNSLYLQMNSLKAGDTALYYCAR

SEQ ID NO: 8647 - protein, 126 aa, Homo sapiens
EVQLVESGGGLVQPGGSLRLSCAASGFTFSNHWMSWVRQAPGKGLEWVANINRDGSETYYVDSVKGRFTISRDNAKNSLYLQMNSLKAGDTALYYCAREDGERMENRFTSWYFDYWGQGSLVTVSS

SEQ ID NO: 8648 - protein, 97 aa, Homo sapiens
EVQLVESGGGLVQPGGSLRLSCAASGFTFSNSWMNWVRQAPGRGLEWVANIKEDGSEENYVDSVKGRFTISRDNAQNSLSLHMNSLRVEDTAVYYCA

SEQ ID NO: 8649 - protein, 121 aa, Homo sapiens
EVQLVESGGGLVQPGGSLRLSCAASGFTFSNSWMNWVRQAPGRGLEWVANIKEDGSEENYVDSVKGRFTISRDNAQNSLSLHMNSLRVEDTAVYYCAKLQPDTGFRPVDFWGQGTMVTVSS

SEQ ID NO: 8650 - protein, 98 aa, Homo sapiens
EVQLVESGGGLVQPGGSLRLSCAASGFTFSNYAMSWVRQAPGKGLEWVSAITGSGDSTYYADSVKGRITISRDNSKYTLYLQMNSLRAEDTAIYYCAK

SEQ ID NO: 8651 - protein, 127 aa, Homo sapiens
EVQLVESGGGLVQPGGSLRLSCAASGFTFSNYAMSWVRQAPGKGLEWVSAITGSGDSTYYADSVKGRITISRDNSKYTLYLQMNSLRAEDTAIYYCAKDPSAEGLPLGDFSSTFDYWGQGTLVTVSS

SEQ ID NO: 8652 - protein, 98 aa, Homo sapiens
EVQLVESGGGLVQPGGSLRLSCAASGFTFSNYPMGWVRQAPGKGLEWVANIKHDESEKFYVDSVKGRFTISRDNAKNSLYLQMNSLRAEDTAVYYCAR

SEQ ID NO: 8653 - protein, 121 aa, Homo sapiens
EVQLVESGGGLVQPGGSLRLSCAASGFTFSNYPMGWVRQAPGKGLEWVANIKHDESEKFYVDSVKGRFTISRDNAKNSLYLQMNSLRAEDTAVYYCARLTPDTCYRPLDCWGQGTLLTVSS

SEQ ID NO: 8654 - protein, 97 aa, Homo sapiens
EVQLVESGGGLVQPGGSLRLSCAASGFTFSNYPMHWVRQAPGKRLEYVSLISSNGGSPYYADFVKGRFTISRDNSKNTLYLQMDNLRPDDMAVYYCA

SEQ ID NO: 8655 - protein, 122 aa, Homo sapiens
EVQLVESGGGLVQPGGSLRLSCAASGFTFSNYPMHWVRQAPGKRLEYVSLISSNGGSPYYADFVKGRFTISRDNSKNTLYLQMDNLRPDDMAVYYCARRYCSGGHCYASDYWGQGTLVTVSS

SEQ ID NO: 8656 - protein, 97 aa, Homo sapiens
EVQLVESGGGLVQPGGSLRLSCAASGFTFSNYWMHWVRQAPGKGLEWVSRIKSDGSATTYTGSVKGRFTISRDNAKNTLFLQMNSLRAEDTAVYYCA

SEQ ID NO: 8657 - protein, 123 aa, Homo sapiens
EVQLVESGGGLVQPGGSLRLSCAASGFTFSNYWMHWVRQAPGKGLEWVSRIKSDGSATTYTGSVKGRFTISRDNAKNTLFLQMNSLRAEDTAVYYCARPRREDYGEYTSFDYWGQGTLVTVSS

SEQ ID NO: 8658 - protein, 97 aa, Homo sapiens
EVQLVESGGGLVQPGGSLRLSCAASGFTFSNYWMTWVRQAPGKGLEWVATIKQDGSEKYYVDSLKGRFTISRDNAQNSLYLQMNSLRVEDTAVYHCA

SEQ ID NO: 8659 - protein, 115 aa, Homo sapiens
EVQLVESGGGLVQPGGSLRLSCAASGFTFSNYWMTWVRQAPGKGLEWVATIKQDGSEKYYVDSLKGRFTISRDNAQNSLYLQMNSLRVEDTAVYHCASLWEGGYWGQGTLVSVSS

SEQ ID NO: 8660 - protein, 97 aa, Homo sapiens
EVQLVESGGGLVQPGGSLRLSCAASGFTFSNYYMNWVRQPPGKGLEWVASIKQDGSEKYYVDSVKGRFTISRDNAKNSLYLQMNSLRAEDTAVYYCA

SEQ ID NO: 8661 - protein, 124 aa, Homo sapiens
EVQLVESGGGLVQPGGSLRLSCAASGFTFSNYYMNWVRQPPGKGLEWVASIKQDGSEKYYVDSVKGRFTISRDNAKNSLYLQMNSLRAEDTAVYYCATSQGELIGELLSPFDYWGQGTLVTVSS

SEQ ID NO: 8662 - protein, 97 aa, Homo sapiens
EVQLVESGGGLVQPGGSLRLSCAASGFTFSRSWMSWVRQAPGKGLEWVANIKEDGSDKYYVDSVKGRFTISRDNAKNSLYLQVNSLRAEDTAVYYCV

SEQ ID NO: 8663 - protein, 115 aa, Homo sapiens
EVQLVESGGGLVQPGGSLRLSCAASGFTFSRSWMSWVRQAPGKGLEWVANIKEDGSDKYYVDSVKGRFTISRDNAKNSLYLQVNSLRAEDTAVYYCVTYQWLGDWGQGTLVTVSS

SEQ ID NO: 8664 - protein, 98 aa, Homo sapiens
EVQLVESGGGLVQPGGSLRLSCAASGFTFSRYWMSWVRQAPGKGLEWVANIKEDGSQKDYVDSVKGRFTISRDNAENSLYLQMNTLRAEDTAVYFCSR

SEQ ID NO: 8665 - protein, 126 aa, Homo sapiens
EVQLVESGGGLVQPGGSLRLSCAASGFTFSRYWMSWVRQAPGKGLEWVANIKEDGSQKDYVDSVKGRFTISRDNAENSLYLQMNTLRAEDTAVYFCSRVALPDDDGNSRYRHIGFWGQGTQVTVSS

SEQ ID NO: 8666 - protein, 97 aa, Homo sapiens
EVQLVESGGGLVQPGGSLRLSCAASGFTFSSYAMHWVRQAPGKGLEYVSAISSNGGSTYYANSVKGRFTISRDNSKNTLYLQMGSLRAEDMAVYYCA

SEQ ID NO: 8667 - protein, 98 aa, Homo sapiens
EVQLVESGGGLVQPGGSLRLSCAASGFTFSSYAMHWVRQAPGKGLEYVSAISSNGGSTYYANSVKGRFTISRDNSKNTLYLQMGSLRAEDMAVYYCAR

SEQ ID NO: 8668 - protein, 127 aa, Homo sapiens
EVQLVESGGGLVQPGGSLRLSCAASGFTFSSYAMHWVRQAPGKGLEYVSAISSNGGSTYYANSVKGRFTISRDNSKNTLYLQMGSLRAEDMAVYYCAREIVDYIAAAGTFYYGMDVWGQGTTVTVSS

SEQ ID NO: 8669 - protein, 121 aa, Homo sapiens
EVQLVESGGGLVQPGGSLRLSCAASGFTFSSYAMHWVRQAPGKGLEYVSAISSNGGSTYYANSVKGRFTISRDNSKNTLYLQMGSLRAEDMAVYYCARELQDTATYYFDYWGQGTLVTVSS

SEQ ID NO: 8670 - protein, 121 aa, Homo sapiens
EVQLVESGGGLVQPGGSLRLSCAASGFTFSSYAMHWVRQAPGKGLEYVSAISSNGGSTYYANSVKGRFTISRDNSKNTLYLQMGSLRAEDMAVYYCASTKTAMVTSAFDIWGQGTMVTVSS

SEQ ID NO: 8671 - protein, 98 aa, Homo sapiens
EVQLVESGGGLVQPGGSLRLSCAASGFTFSSYAMNWVRQAPGKGLEWVSTISGSGGSTSYADSVKGRFTISRDNSKNTLYLQMNSLRAEDTAVYYCAK

SEQ ID NO: 8672 - protein, 125 aa, Homo sapiens
EVQLVESGGGLVQPGGSLRLSCAASGFTFSSYAMNWVRQAPGKGLEWVSTISGSGGSTSYADSVKGRFTISRDNSKNTLYLQMNSLRAEDTAVYYCAKDGSNQYYYDSSGYYSGWGQGTLVTVSS

SEQ ID NO: 8673 - protein, 98 aa, Homo sapiens
EVQLVESGGGLVQPGGSLRLSCAASGFTFSSYAMSWVRQAPGKGLEWVSAISDSDRTTYYADSVKGRFTISRDNSRNTLYLQMNSLRAEDTAVYYCAK

SEQ ID NO: 8674 - protein, 122 aa, Homo sapiens
EVQLVESGGGLVQPGGSLRLSCAASGFTFSSYAMSWVRQAPGKGLEWVSAISDSDRTTYYADSVKGRFTISRDNSRNTLYLQMNSLRAEDTAVYYCAKGPSYEFWSGYFHYWGQGTLVTVSS

SEQ ID NO: 8675 - protein, 98 aa, Homo sapiens
EVQLVESGGGLVQPGGSLRLSCAASGFTFSSYAMSWVRQAPGKGLEWVSAISGSGGSTYYADSVKGRFTISRDNSKNTLYLQMNSLRAEDTAVYYCAK

SEQ ID NO: 8676 - protein, 122 aa, Homo sapiens
EVQLVESGGGLVQPGGSLRLSCAASGFTFSSYAMSWVRQAPGKGLEWVSAISGSGGSTYYADSVKGRFTISRDNSKNTLYLQMNSLRAEDTAVYYCAKLAGYYYYYYYMDVWGKGTTVTVSS

SEQ ID NO: 8677 - protein, 123 aa, Homo sapiens
EVQLVESGGGLVQPGGSLRLSCAASGFTFSSYAMSWVRQAPGKGLEWVSAISGSGGSTYYADSVKGRFTISRDNSKNTLYLQMNSLRAEDTAVYYCAKLNSERLRFLPYMDVWGKGTTVTVSS

SEQ ID NO: 8678 - protein, 97 aa, Homo sapiens
EVQLVESGGGLVQPGGSLRLSCAASGFTFSSYDMHWVRQATGKGLEWVSAIGTAGDTYYPGSVKGRFTISRENAKNSLYLQMNSLRAGDTAVYYCAR

SEQ ID NO: 8679 - protein, 124 aa, Homo sapiens
EVQLVESGGGLVQPGGSLRLSCAASGFTFSSYDMHWVRQATGKGLEWVSAIGTAGDTYYPGSVKGRFTISRENAKNSLYLQMNSLRAGDTAVYYCARGAGTVNYGDYEDAFDIWGQGTMVTVSS

SEQ ID NO: 8680 - protein, 97 aa, Homo sapiens
EVQLVESGGGLVQPGGSLRLSCAASGFTFSSYDMHWVRQATGKGLEWVSTIGTQSDTFYSGSVEGRFTISRENAKNSLYLQMNSLRAGDTAVYYCAR

SEQ ID NO: 8681 - protein, 125 aa, Homo sapiens
EVQLVESGGGLVQPGGSLRLSCAASGFTFSSYDMHWVRQATGKGLEWVSTIGTQSDTFYSGSVEGRFTISRENAKNSLYLQMNSLRAGDTAVYYCARGPLCNSTTCPTDDAFDIWGQGTKVTVSS

SEQ ID NO: 8682 - protein, 98 aa, Homo sapiens
EVQLVESGGGLVQPGGSLRLSCAASGFTFSSYEMNWVRQAPGKGLDWVSYITIDNSTVYYADSVKGRFTISRDNAKNSLYLQMNSLRAEDTAIYYCAR

SEQ ID NO: 8683 - protein, 118 aa, Homo sapiens
EVQLVESGGGLVQPGGSLRLSCAASGFTFSSYEMNWVRQAPGKGLDWVSYITIDNSTVYYADSVKGRFTISRDNAKNSLYLQMNSLRAEDTAIYYCARTAHEDAFDIWGQGTLVTVSS

SEQ ID NO: 8684 - protein, 96 aa, Homo sapiens
EVQLVESGGGLVQPGGSLRLSCAASGFTFSSYEMNWVRQAPGKGLEWVSYISSSGDTIYYADSVKGRFTISRDNAKNSLYLQMNSLRAEDTAVYYC

SEQ ID NO: 8685 - protein, 122 aa, Homo sapiens
EVQLVESGGGLVQPGGSLRLSCAASGFTFSSYEMNWVRQAPGKGLEWVSYISSSGDTIYYADSVKGRFTISRDNAKNSLYLQMNSLRAEDTAVYYCTVGSSGWYGGNVFDIWGQGTMVTVSS

SEQ ID NO: 8686 - protein, 97 aa, Homo sapiens
EVQLVESGGGLVQPGGSLRLSCAASGFTFSSYEMNWVRQAPGKGLEWVSYISSSGSTIYYADSVKGRFTISRDNAKNSLYLQMNSLRAEDTAVYYCA

SEQ ID NO: 8687 - protein, 98 aa, Homo sapiens
EVQLVESGGGLVQPGGSLRLSCAASGFTFSSYEMNWVRQAPGKGLEWVSYISSSGSTIYYADSVKGRFTISRDNAKNSLYLQMNSLRAEDTAVYYCAR

SEQ ID NO: 8688 - protein, 123 aa, Homo sapiens
EVQLVESGGGLVQPGGSLRLSCAASGFTFSSYEMNWVRQAPGKGLEWVSYISSSGSTIYYADSVKGRFTISRDNAKNSLYLQMNSLRAEDTAVYYCARDLSFAIWFGDHRDYWGQGTLVTVSS

SEQ ID NO: 8689 - protein, 116 aa, Homo sapiens
EVQLVESGGGLVQPGGSLRLSCAASGFTFSSYEMNWVRQAPGKGLEWVSYISSSGSTIYYADSVKGRFTISRDNAKNSLYLQMNSLRAEDTAVYYCARDQMAWDYWGQGTLVTVSS

SEQ ID NO: 8690 - protein, 126 aa, Homo sapiens
EVQLVESGGGLVQPGGSLRLSCAASGFTFSSYEMNWVRQAPGKGLEWVSYISSSGSTIYYADSVKGRFTISRDNAKNSLYLQMNSLRAEDTAVYYCARDSLSVHDYGDYVSYFDYWGQGTLVTVSS

SEQ ID NO: 8691 - protein, 118 aa, Homo sapiens
EVQLVESGGGLVQPGGSLRLSCAASGFTFSSYEMNWVRQAPGKGLEWVSYISSSGSTIYYADSVKGRFTISRDNAKNSLYLQMNSLRAEDTAVYYCARDTGDGWLVHWGQGTLVTVSS

SEQ ID NO: 8692 - protein, 122 aa, Homo sapiens
EVQLVESGGGLVQPGGSLRLSCAASGFTFSSYEMNWVRQAPGKGLEWVSYISSSGSTIYYADSVKGRFTISRDNAKNSLYLQMNSLRAEDTAVYYCARDYVSWGELRGLDYWGQGTLVTVSS

SEQ ID NO: 8693 - protein, 121 aa, Homo sapiens
EVQLVESGGGLVQPGGSLRLSCAASGFTFSSYEMNWVRQAPGKGLEWVSYISSSGSTIYYADSVKGRFTISRDNAKNSLYLQMNSLRAEDTAVYYCAREEVHYYYYGMDVWGQGTTVTVSS

SEQ ID NO: 8694 - protein, 129 aa, Homo sapiens
EVQLVESGGGLVQPGGSLRLSCAASGFTFSSYEMNWVRQAPGKGLEWVSYISSSGSTIYYADSVKGRFTISRDNAKNSLYLQMNSLRAEDTAVYYCARETGHCSGGSCYDYYYYGMDVWGQGTTVTVSS

SEQ ID NO: 8695 - protein, 120 aa, Homo sapiens
EVQLVESGGGLVQPGGSLRLSCAASGFTFSSYEMNWVRQAPGKGLEWVSYISSSGSTIYYADSVKGRFTISRDNAKNSLYLQMNSLRAEDTAVYYCARLYSYGYSDLGYWGQGTLVTVSS

SEQ ID NO: 8696 - protein, 116 aa, Homo sapiens
EVQLVESGGGLVQPGGSLRLSCAASGFTFSSYEMNWVRQAPGKGLEWVSYISSSGSTIYYADSVKGRFTISRDNAKNSLYLQMNSLRAEDTAVYYCARSAHYWDVWGQGTTVTVSS

SEQ ID NO: 8697 - protein, 120 aa, Homo sapiens
EVQLVESGGGLVQPGGSLRLSCAASGFTFSSYEMNWVRQAPGKGLEWVSYISSSGSTIYYADSVKGRFTISRDNAKNSLYLQMNSLRAEDTAVYYCARVARATTYYFDYWGQGTLVTVSS

SEQ ID NO: 8698 - protein, 124 aa, Homo sapiens
EVQLVESGGGLVQPGGSLRLSCAASGFTFSSYEMNWVRQAPGKGLEWVSYISSSGSTIYYADSVKGRFTISRDNAKNSLYLQMNSLRAEDTAVYYCARVGISGSYQTVDAFDIWGQGTMVTVSS

SEQ ID NO: 8699 - protein, 122 aa, Homo sapiens
EVQLVESGGGLVQPGGSLRLSCAASGFTFSSYEMNWVRQAPGKGLEWVSYISSSGSTIYYADSVKGRFTISRDNAKNSLYLQMNSLRAEDTAVYYCASQVEGSGSVTYFQHWGQGTLVTVSS

SEQ ID NO: 8700 - protein, 122 aa, Homo sapiens
EVQLVESGGGLVQPGGSLRLSCAASGFTFSSYEMNWVRQAPGKGLEWVSYISSSGSTIYYADSVKGRFTISRDNAKNSLYLQMNSLRAEDTAVYYCATWEGVPAAMSWFDPWGQGTLVTVSS

SEQ ID NO: 8701 - protein, 98 aa, Homo sapiens
EVQLVESGGGLVQPGGSLRLSCAASGFTFSSYEMNWVRQAPGKGLEWVSYISSSGSTIYYADSVKGRFTISRDNAQNSLYLQMNSLRAEDTAVYYCAR

SEQ ID NO: 8702 - protein, 122 aa, Homo sapiens
EVQLVESGGGLVQPGGSLRLSCAASGFTFSSYEMNWVRQAPGKGLEWVSYISSSGSTIYYADSVKGRFTISRDNAQNSLYLQMNSLRAEDTAVYYCARVGWVAARRAPIDYWGQGTLVTVSS

SEQ ID NO: 8703 - protein, 98 aa, Homo sapiens
EVQLVESGGGLVQPGGSLRLSCAASGFTFSSYEMNWVRQAPGKGLEWVSYISSSGYIIYYADSVKGRFTISRDNAKNSLYLQMNSLRAEDTAVYYCAR

SEQ ID NO: 8704 - protein, 116 aa, Homo sapiens
EVQLVESGGGLVQPGGSLRLSCAASGFTFSSYEMNWVRQAPGKGLEWVSYISSSGYIIYYADSVKGRFTISRDNAKNSLYLQMNSLRAEDTAVYYCARDAHYWHYWGQGTLVTVSS

SEQ ID NO: 8705 - protein, 98 aa, Homo sapiens
EVQLVESGGGLVQPGGSLRLSCAASGFTFSSYEMNWVRQGPGKGLEWVSHISSSGSTTYYADSVKGRFTISRDNAKNSLYLQMNSLRAEDTAVYYCAR

SEQ ID NO: 8706 - protein, 120 aa, Homo sapiens
EVQLVESGGGLVQPGGSLRLSCAASGFTFSSYEMNWVRQGPGKGLEWVSHISSSGSTTYYADSVKGRFTISRDNAKNSLYLQMNSLRAEDTAVYYCARDGGIVVASLDYWGQGTLVTVSS

SEQ ID NO: 8707 - protein, 98 aa, Homo sapiens
EVQLVESGGGLVQPGGSLRLSCAASGFTFSSYSMNWVRQAPGKGLEWVSYIGSRSETIYYADSVKGRFTISRDNAKNSLYLQMNSLRDEDTAVYYCAR

SEQ ID NO: 8708 - protein, 118 aa, Homo sapiens
EVQLVESGGGLVQPGGSLRLSCAASGFTFSSYSMNWVRQAPGKGLEWVSYIGSRSETIYYADSVKGRFTISRDNAKNSLYLQMNSLRDEDTAVYYCARDLWGIVVPNWGQGTLVTVSS

SEQ ID NO: 8709 - protein, 98 aa, Homo sapiens
EVQLVESGGGLVQPGGSLRLSCAASGFTFSSYSMNWVRQAPGKGLEWVSYISSSSSTIYYADSVKGRFTISRDNAKNSLYLQMNSLRAEDTAVYYCAR

SEQ ID NO: 8710 - protein, 130 aa, Homo sapiens
EVQLVESGGGLVQPGGSLRLSCAASGFTFSSYSMNWVRQAPGKGLEWVSYISSSSSTIYYADSVKGRFTISRDNAKNSLYLQMNSLRAEDTAVYYCARDKGYWYYYDSSGYSYHGAFDIWGQGTMVTVSS

SEQ ID NO: 8711 - protein, 98 aa, Homo sapiens
EVQLVESGGGLVQPGGSLRLSCAASGFTFSSYSMNWVRQAPGKGLEWVSYISSSSSTIYYADSVKGRFTISRDNAKNSLYLQMNSLRDEDTAVYYCAR

SEQ ID NO: 8712 - protein, 121 aa, Homo sapiens
EVQLVESGGGLVQPGGSLRLSCAASGFTFSSYSMNWVRQAPGKGLEWVSYISSSSSTIYYADSVKGRFTISRDNAKNSLYLQMNSLRDEDTAVYYCARDDIQLLPGPFDYWGQGTLVTVSS

SEQ ID NO: 8713 - protein, 129 aa, Homo sapiens
EVQLVESGGGLVQPGGSLRLSCAASGFTFSSYSMNWVRQAPGKGLEWVSYISSSSSTIYYADSVKGRFTISRDNAKNSLYLQMNSLRDEDTAVYYCARDSYDFWSGYYLTYYYYYMDVWGKGTTVTVSS

SEQ ID NO: 8714 - protein, 98 aa, Homo sapiens
EVQLVESGGGLVQPGGSLRLSCAASGFTFSSYWMHWVRQAPGKGLVWVSHINSDGSSTRYADSVKGRFTISRDNAKNTLYLQMNSLRAEDTAVYYCAR

SEQ ID NO: 8715 - protein, 125 aa, Homo sapiens
EVQLVESGGGLVQPGGSLRLSCAASGFTFSSYWMHWVRQAPGKGLVWVSHINSDGSSTRYADSVKGRFTISRDNAKNTLYLQMNSLRAEDTAVYYCARDLITPLDYSNPAGVDYWGQGTLVTVSS

SEQ ID NO: 8716 - protein, 98 aa, Homo sapiens
EVQLVESGGGLVQPGGSLRLSCAASGFTFSSYWMHWVRQAPGKGLVWVSRINSDGSSTSYADSVKGRFTISRDNAKNTLYLQMNSLRAEDTAVYFCAR

SEQ ID NO: 8717 - protein, 125 aa, Homo sapiens
EVQLVESGGGLVQPGGSLRLSCAASGFTFSSYWMHWVRQAPGKGLVWVSRINSDGSSTSYADSVKGRFTISRDNAKNTLYLQMNSLRAEDTAVYFCARDLVKRYSSVYEAGTDYWGQGTLVTVSS

SEQ ID NO: 8718 - protein, 98 aa, Homo sapiens
EVQLVESGGGLVQPGGSLRLSCAASGFTFSSYWMHWVRQAPGKGLVWVSRINSDGSSTSYADSVKGRFTISRDNAKNTLYLQMNSLRAEDTAVYYCAR

SEQ ID NO: 8719 - protein, 122 aa, Homo sapiens
EVQLVESGGGLVQPGGSLRLSCAASGFTFSSYWMHWVRQAPGKGLVWVSRINSDGSSTSYADSVKGRFTISRDNAKNTLYLQMNSLRAEDTAVYYCARDAYYYGSGSAFDYWGQGTLVTVSS

SEQ ID NO: 8720 - protein, 120 aa, Homo sapiens
EVQLVESGGGLVQPGGSLRLSCAASGFTFSSYWMHWVRQAPGKGLVWVSRINSDGSSTSYADSVKGRFTISRDNAKNTLYLQMNSLRAEDTAVYYCARDGYYDRNAFDIWGQGTMVTVSS

SEQ ID NO: 8721 - protein, 121 aa, Homo sapiens
EVQLVESGGGLVQPGGSLRLSCAASGFTFSSYWMHWVRQAPGKGLVWVSRINSDGSSTSYADSVKGRFTISRDNAKNTLYLQMNSLRAEDTAVYYCARDRDYYDSSGYLFWGQGTLVTVSS

SEQ ID NO: 8722 - protein, 123 aa, Homo sapiens
EVQLVESGGGLVQPGGSLRLSCAASGFTFSSYWMHWVRQAPGKGLVWVSRINSDGSSTSYADSVKGRFTISRDNAKNTLYLQMNSLRAEDTAVYYCARDRPRVGATREPFDYWGQGTLVTVSS

SEQ ID NO: 8723 - protein, 117 aa, Homo sapiens
EVQLVESGGGLVQPGGSLRLSCAASGFTFSSYWMHWVRQAPGKGLVWVSRINSDGSSTSYADSVKGRFTISRDNAKNTLYLQMNSLRAEDTAVYYCAREQQLVIDYWGQGTLVTVSS

SEQ ID NO: 8724 - protein, 98 aa, Homo sapiens
EVQLVESGGGLVQPGGSLRLSCAASGFTFSSYWMSWVRQAPGKGLEWVANIKQDGSEKYFVDSVKGRFTISRDNAKNSLYLQMNNLRAEDTAVYYCAR

SEQ ID NO: 8725 - protein, 125 aa, Homo sapiens
EVQLVESGGGLVQPGGSLRLSCAASGFTFSSYWMSWVRQAPGKGLEWVANIKQDGSEKYFVDSVKGRFTISRDNAKNSLYLQMNNLRAEDTAVYYCARVHCSSTSCYYYYYMDVWGKGTTVTVSS

SEQ ID NO: 8726 - protein, 98 aa, Homo sapiens
EVQLVESGGGLVQPGGSLRLSCAASGFTFSSYWMSWVRQAPGKGLEWVANIKQDGSEKYYVDSVKGRFTISRDNAKNSLYLQMNSLRAEDTAVYYCAR

SEQ ID NO: 8727 - protein, 118 aa, Homo sapiens
EVQLVESGGGLVQPGGSLRLSCAASGFTFSSYWMSWVRQAPGKGLEWVANIKQDGSEKYYVDSVKGRFTISRDNAKNSLYLQMNSLRAEDTAVYYCARAGPGAAFDIWGQGTMVTVSS

SEQ ID NO: 8728 - protein, 126 aa, Homo sapiens
EVQLVESGGGLVQPGGSLRLSCAASGFTFSSYWMSWVRQAPGKGLEWVANIKQDGSEKYYVDSVKGRFTISRDNAKNSLYLQMNSLRAEDTAVYYCARDRRIGSWPDYYYYGMDVWGQGTTVTVSS

SEQ ID NO: 8729 - protein, 123 aa, Homo sapiens
EVQLVESGGGLVQPGGSLRLSCAASGFTFSSYWMSWVRQAPGKGLEWVANIKQDGSEKYYVDSVKGRFTISRDNAKNSLYLQMNSLRAEDTAVYYCARDRWAGNSPGPTMDVWGQGTTVTVSS

SEQ ID NO: 8730 - protein, 127 aa, Homo sapiens
EVQLVESGGGLVQPGGSLRLSCAASGFTFSSYWMSWVRQAPGKGLEWVANIKQDGSEKYYVDSVKGRFTISRDNAKNSLYLQMNSLRAEDTAVYYCARDSLFDFWSGQPGGVSFDYWGQGTLVTVSS

SEQ ID NO: 8731 - protein, 117 aa, Homo sapiens
EVQLVESGGGLVQPGGSLRLSCAASGFTFSSYWMSWVRQAPGKGLEWVANIKQDGSEKYYVDSVKGRFTISRDNAKNSLYLQMNSLRAEDTAVYYCARDWPGAFDIWGQGTMVTVSS

SEQ ID NO: 8732 - protein, 125 aa, Homo sapiens
EVQLVESGGGLVQPGGSLRLSCAASGFTFSSYWMSWVRQAPGKGLEWVANIKQDGSEKYYVDSVKGRFTISRDNAKNSLYLQMNSLRAEDTAVYYCARELIRGVIFAYYYGMDVWGQGTTVTVSS

SEQ ID NO: 8733 - protein, 124 aa, Homo sapiens
EVQLVESGGGLVQPGGSLRLSCAASGFTFSSYWMSWVRQAPGKGLEWVANIKQDGSEKYYVDSVKGRFTISRDNAKNSLYLQMNSLRAEDTAVYYCARERCSGGSCYPGVSDYWGQGTLVTVSS

SEQ ID NO: 8734 - protein, 122 aa, Homo sapiens
EVQLVESGGGLVQPGGSLRLSCAASGFTFSSYWMSWVRQAPGKGLEWVANIKQDGSEKYYVDSVKGRFTISRDNAKNSLYLQMNSLRAEDTAVYYCARQWSLYYGDYVLDYWGQGTLVTVSS

SEQ ID NO: 8735 - protein, 98 aa, Homo sapiens
EVQLVESGGGLVQPGGSLRLSCAASGFTFSSYWMSWVRQPPGKGLEWVADIKEDGSKVYYVDSVKGRFTISRDNAKNSLYLQMNSLRAEDTAVYYCAR

SEQ ID NO: 8736 - protein, 126 aa, Homo sapiens
EVQLVESGGGLVQPGGSLRLSCAASGFTFSSYWMSWVRQPPGKGLEWVADIKEDGSKVYYVDSVKGRFTISRDNAKNSLYLQMNSLRAEDTAVYYCARDNNLYYDGNTYYWGFDQWGQGTLLTVSA

SEQ ID NO: 8737 - protein, 97 aa, Homo sapiens
EVQLVESGGGLVQPGGSLRLSCAASGFTFSSYWMSWVRQPPGKGLEWVANIKQDGSEKYYVDSVKGRFTISRDNAKNSLYLQMNSLRAEDTAVYYCA

SEQ ID NO: 8738 - protein, 125 aa, Homo sapiens
EVQLVESGGGLVQPGGSLRLSCAASGFTFSSYWMSWVRQPPGKGLEWVANIKQDGSEKYYVDSVKGRFTISRDNAKNSLYLQMNSLRAEDTAVYYCARTIWIVVVPAAPGYFDYWGQGTLVTVSS

SEQ ID NO: 8739 - protein, 101 aa, Homo sapiens
EVQLVESGGGLVQPGGSLRLSCAASGFTFSTYGMNWVRQAPGKGLEWVSYIRSSSGSSNDIYYADSVKGRFTISRDNAKNSLYLQMNSLRAEDTAVYYCAR

SEQ ID NO: 8740 - protein, 124 aa, Homo sapiens
EVQLVESGGGLVQPGGSLRLSCAASGFTFSTYGMNWVRQAPGKGLEWVSYIRSSSGSSNDIYYADSVKGRFTISRDNAKNSLYLQMNSLRAEDTAVYYCARDLWDYEGEADDYWGQGTLVTVSS

SEQ ID NO: 8741 - protein, 98 aa, Homo sapiens
EVQLVESGGGLVQPGGSLRLSCAASGFTFSTYWMHWVRQVPGKGLVWVSRINGDGTKINYVDSVKGRFTISRDNAKNTLYLQLNSLRAEDTAVYYCSR

SEQ ID NO: 8742 - protein, 121 aa, Homo sapiens
EVQLVESGGGLVQPGGSLRLSCAASGFTFSTYWMHWVRQVPGKGLVWVSRINGDGTKINYVDSVKGRFTISRDNAKNTLYLQLNSLRAEDTAVYYCSRGALENTYSDWSHWGQGTLVTVSS

SEQ ID NO: 8743 - protein, 97 aa, Homo sapiens
EVQLVESGGGLVQPGGSLRLSCAASGFTFSTYWMTWVRLAPGKGLEWLANIKEDGSEVLYVDSVKGRFTISRDNAMNSVYLQMNSLRVEDTAVYYCA

SEQ ID NO: 8744 - protein, 120 aa, Homo sapiens
EVQLVESGGGLVQPGGSLRLSCAASGFTFSTYWMTWVRLAPGKGLEWLANIKEDGSEVLYVDSVKGRFTISRDNAMNSVYLQMNSLRVEDTAVYYCASLNSWHSAPMDVWGKGTTVTVSS

SEQ ID NO: 8745 - protein, 98 aa, Homo sapiens
EVQLVESGGGLVQPGGSLRLSCAASGFTLRSYNMNWVRQAPGKGLEWISYISSSSSTMYYADSVKGRFTISRDNAKNSLYLQMNSLRAEDTAVYYCAR

SEQ ID NO: 8746 - protein, 122 aa, Homo sapiens
EVQLVESGGGLVQPGGSLRLSCAASGFTLRSYNMNWVRQAPGKGLEWISYISSSSSTMYYADSVKGRFTISRDNAKNSLYLQMNSLRAEDTAVYYCARGVEMTISGWYFDLWGRGNMVTVSS

SEQ ID NO: 8747 - protein, 100 aa, Homo sapiens
EVQLVESGGGLVQPGGSLRLSCAASGFTLSDYYMDWVRQAPGKGLEWVGSIRSKAQGYTIEYAASVKGRFIISGDDSTNSLYLQMNSLTTDDTAVYYCAR

SEQ ID NO: 8748 - protein, 122 aa, Homo sapiens
EVQLVESGGGLVQPGGSLRLSCAASGFTLSDYYMDWVRQAPGKGLEWVGSIRSKAQGYTIEYAASVKGRFIISGDDSTNSLYLQMNSLTTDDTAVYYCARMRENSGWFNDFWGQGTLVTVSS

SEQ ID NO: 8749 - protein, 98 aa, Homo sapiens
EVQLVESGGGLVQPGGSLRLSCAASGFTLSSYSMNWVRQAPGKGLEWVSYISDSSGSRYYADSVKGRFTISRDNAKNSLFLQVNSLRAEDTAVYYCAR

SEQ ID NO: 8750 - protein, 125 aa, Homo sapiens
EVQLVESGGGLVQPGGSLRLSCAASGFTLSSYSMNWVRQAPGKGLEWVSYISDSSGSRYYADSVKGRFTISRDNAKNSLFLQVNSLRAEDTAVYYCARDLIKGNKPWQLGSFDVWGPGTMVTVSS

SEQ ID NO: 8751 - protein, 97 aa, Homo sapiens
EVQLVESGGGLVQPGGSLRLSCAASGFTSSNYWMSWVRQAPGKGLEWVANIKEDGSEVHYVDSVKGRFTVSRDNARNSLFLIMDSLRAEDTAVYYCA

SEQ ID NO: 8752 - protein, 124 aa, Homo sapiens
EVQLVESGGGLVQPGGSLRLSCAASGFTSSNYWMSWVRQAPGKGLEWVANIKEDGSEVHYVDSVKGRFTVSRDNARNSLFLIMDSLRAEDTAVYYCARHSYYDKSTHYRHFDYWGQGTLVTVSS

SEQ ID NO: 8753 - protein, 97 aa, Homo sapiens
EVQLVESGGGLVQPGGSLRLSCAASGFTVSQNYMSWVRQAPGKGLEWVSVIYPSGAADYSSSVRGSFTVSRDNSKNTVYIQMNSLRVEDTAVYYCAR

SEQ ID NO: 8754 - protein, 120 aa, Homo sapiens
EVQLVESGGGLVQPGGSLRLSCAASGFTVSQNYMSWVRQAPGKGLEWVSVIYPSGAADYSSSVRGSFTVSRDNSKNTVYIQMNSLRVEDTAVYYCAREDYSSYYYGMDVWGQGTTVTVSS

SEQ ID NO: 8755 - protein, 97 aa, Homo sapiens
EVQLVESGGGLVQPGGSLRLSCAASGFTVSSKYMSWVRQAPGKGLEWVSVIYSGDITYYSNSVRGRFTISRDNSRNTLYLQMNSLRAEDTAVYYCAR

SEQ ID NO: 8756 - protein, 119 aa, Homo sapiens
EVQLVESGGGLVQPGGSLRLSCAASGFTVSSKYMSWVRQAPGKGLEWVSVIYSGDITYYSNSVRGRFTISRDNSRNTLYLQMNSLRAEDTAVYYCARGTDSAATRVDAWGQGTTVTVSS

SEQ ID NO: 8757 - protein, 97 aa, Homo sapiens
EVQLVESGGGLVQPGGSLRLSCAASGFTVSSNYMNWVRQAPGKGLEWVSVIYSGGSTYYADSVKGRFTISRDNSKNTLYLQMNSLRAEDTAVYYCAR

SEQ ID NO: 8758 - protein, 123 aa, Homo sapiens
EVQLVESGGGLVQPGGSLRLSCAASGFTVSSNYMNWVRQAPGKGLEWVSVIYSGGSTYYADSVKGRFTISRDNSKNTLYLQMNSLRAEDTAVYYCARDDRDGYNYYYYGMDVWGQGTTVTVSS

SEQ ID NO: 8759 - protein, 97 aa, Homo sapiens
EVQLVESGGGLVQPGGSLRLSCAASGFTVSSNYMSWVRQAPGKGLEWVSVIYSGGSTYYADSVKGRFTISRDNSKNTLYLQMNSLRAEDTAVYYCAR

SEQ ID NO: 8760 - protein, 118 aa, Homo sapiens
EVQLVESGGGLVQPGGSLRLSCAASGFTVSSNYMSWVRQAPGKGLEWVSVIYSGGSTYYADSVKGRFTISRDNSKNTLYLQMNSLRAEDTAVYYCAREGAAGTYFDYWGQGTLVTVSS

SEQ ID NO: 8761 - protein, 125 aa, Homo sapiens
EVQLVESGGGLVQPGGSLRLSCAASGFTVSSNYMSWVRQAPGKGLEWVSVIYSGGSTYYADSVKGRFTISRDNSKNTLYLQMNSLRAEDTAVYYCARGGRKRVVVAAAAYYFDYWGQGTLVTVSS

SEQ ID NO: 8762 - protein, 126 aa, Homo sapiens
EVQLVESGGGLVQPGGSLRLSCAASGFTVSSNYMSWVRQAPGKGLEWVSVIYSGGSTYYADSVKGRFTISRDNSKNTLYLQMNSLRAEDTAVYYCARGQYYYDSSGYYSYWYFDLWGRGTLVTVSS

SEQ ID NO: 8763 - protein, 96 aa, Homo sapiens
EVQLVESGGGLVQPGGSLRLSCAASRFTFSNYDMQWVRQATGKGLEWVATVGAAGDTYYADSVEGRFTVSRDNARSSLYLQMNSLRPGDTAIYYCA

SEQ ID NO: 8764 - protein, 115 aa, Homo sapiens
EVQLVESGGGLVQPGGSLRLSCAASRFTFSNYDMQWVRQATGKGLEWVATVGAAGDTYYADSVEGRFTVSRDNARSSLYLQMNSLRPGDTAIYYCARWGEGLDYWGQGTLVTVSS

SEQ ID NO: 8765 - protein, 99 aa, Homo sapiens
EVQLVESGGGLVQPGGSLRLSCAGSGFRFSDHYMDWVRQAPGKGLEWVGRIRKNANSYTTEYAASVKGRFTISRDDSKSSLFLQMNSLETEDTAVYYCA

SEQ ID NO: 8766 - protein, 123 aa, Homo sapiens
EVQLVESGGGLVQPGGSLRLSCAGSGFRFSDHYMDWVRQAPGKGLEWVGRIRKNANSYTTEYAASVKGRFTISRDDSKSSLFLQMNSLETEDTAVYYCARNYYDGSAFYFDYWGQGTLVTVSS

SEQ ID NO: 8767 - protein, 96 aa, Homo sapiens
EVQLVESGGGLVQPGGSLRLSCATSGYPVSGNHMTWVRQAPGKGLGWVSIIYGGGATHYADSVKGRFSISRDASKNIVYLQMNSLRTEDSAVYYCA

SEQ ID NO: 8768 - protein, 114 aa, Homo sapiens
EVQLVESGGGLVQPGGSLRLSCATSGYPVSGNHMTWVRQAPGKGLGWVSIIYGGGATHYADSVKGRFSISRDASKNIVYLQMNSLRTEDSAVYYCASFGAGSSVGQGTRVTVSS

SEQ ID NO: 8769 - protein, 100 aa, Homo sapiens
EVQLVESGGGLVQPGGSLRLSCAVSGFSFSGHYMEWVRQAPGKGLEWVGATRNKANNYTTEFAASVKGRFSISTDESKNSVYLQMNSLKTEDTAVYYCAR

SEQ ID NO: 8770 - protein, 123 aa, Homo sapiens
EVQLVESGGGLVQPGGSLRLSCAVSGFSFSGHYMEWVRQAPGKGLEWVGATRNKANNYTTEFAASVKGRFSISTDESKNSVYLQMNSLKTEDTAVYYCARDVNWGSDWYFDLWGRGTLVTVSS

SEQ ID NO: 8771 - protein, 100 aa, Homo sapiens
EVQLVESGGGLVQPGGSLRLSCAVSGFSISGHYMEWVRQAPGKGLEWVGATRNKRNNYTTEYAASVKGRFSISRDESKNSVYLQMNSLKTEDTAVYYCAR

SEQ ID NO: 8772 - protein, 122 aa, Homo sapiens
EVQLVESGGGLVQPGGSLRLSCAVSGFSISGHYMEWVRQAPGKGLEWVGATRNKRNNYTTEYAASVKGRFSISRDESKNSVYLQMNSLKTEDTAVYYCARDVNWGSDWCFDLWGRGTLVTVS

SEQ ID NO: 8773 - protein, 98 aa, Homo sapiens
EVQLVESGGGLVQPGGSLRLSCAVSGFTFSNYWIHWVRQAPGEGLVWVSRISPDGSIATYADSVKGRFTISRDNAKNMLYLQMNSLRGEDTAVYYCAK

SEQ ID NO: 8774 - protein, 116 aa, Homo sapiens
EVQLVESGGGLVQPGGSLRLSCAVSGFTFSNYWIHWVRQAPGEGLVWVSRISPDGSIATYADSVKGRFTISRDNAKNMLYLQMNSLRGEDTAVYYCAKDFDRGDDWGQGTLVTVSS

SEQ ID NO: 8775 - protein, 97 aa, Homo sapiens
EVQLVESGGGLVQPGGSLRLSCAVSGFTFSSYEMNWVRQAPGKGLEWVSYISSSGFTVHYADSVKGRFTISRDNAKNSLHLQMNSLRAEDTAVYYCA

SEQ ID NO: 8776 - protein, 122 aa, Homo sapiens
EVQLVESGGGLVQPGGSLRLSCAVSGFTFSSYEMNWVRQAPGKGLEWVSYISSSGFTVHYADSVKGRFTISRDNAKNSLHLQMNSLRAEDTAVYYCARNAYYGSGSYNFDYWGQGTLVTVSS

SEQ ID NO: 8777 - protein, 98 aa, Homo sapiens
EVQLVESGGGLVQPGGSLRLSCAVSGFTLRSYSMHWVRQAPGKGLEWVSYISSSSLSRYYADSVKGRFTVSRDNGDNLLYLQMNSLRAEDTAMYYCVR

SEQ ID NO: 8778 - protein, 123 aa, Homo sapiens
EVQLVESGGGLVQPGGSLRLSCAVSGFTLRSYSMHWVRQAPGKGLEWVSYISSSSLSRYYADSVKGRFTVSRDNGDNLLYLQMNSLRAEDTAMYYCVRDGGMTVVAMGTLDIWGRGTMVTVSS

SEQ ID NO: 8779 - protein, 97 aa, Homo sapiens
EVQLVESGGGLVQPGGSLRLSCAVSGLTVSSNYMSWVRQAPGKGLEWVSVIYSGSGTYYADSVKGRFTISRDNSKNTLYLQMNSLRAEDTAVYYCAR

SEQ ID NO: 8780 - protein, 126 aa, Homo sapiens
EVQLVESGGGLVQPGGSLRLSCAVSGLTVSSNYMSWVRQAPGKGLEWVSVIYSGSGTYYADSVKGRFTISRDNSKNTLYLQMNSLRAEDTAVYYCARDRRSSGWYDGAYNYYMDVWGKGTTVTVSS

SEQ ID NO: 8781 - protein, 98 aa, Homo sapiens
EVQLVESGGGLVQPGGSLRLSCEASGFTFSAYWMHWVRQAPGQGLMWLSRIDNGGSYTTYADSVKGRFTISRDNARNTLYLQMNSLGVDDTAVYYCLR

SEQ ID NO: 8782 - protein, 120 aa, Homo sapiens
EVQLVESGGGLVQPGGSLRLSCEASGFTFSAYWMHWVRQAPGQGLMWLSRIDNGGSYTTYADSVKGRFTISRDNARNTLYLQMNSLGVDDTAVYYCLRAYSANYGRFDPWGQGTLVTVSS

SEQ ID NO: 8783 - protein, 98 aa, Homo sapiens
EVQLVESGGGLVQPGGSLRLSCEASGFTFSNYWMSWVRQAPGMGLEWVANMKKDGSEIYYVDSVKGRFTISRDNAKNSVYLQMNSLRVEDTAVYYCAR

SEQ ID NO: 8784 - protein, 116 aa, Homo sapiens
EVQLVESGGGLVQPGGSLRLSCEASGFTFSNYWMSWVRQAPGMGLEWVANMKKDGSEIYYVDSVKGRFTISRDNAKNSVYLQMNSLRVEDTAVYYCARDGDQFDYWGQGTLVTVSS

SEQ ID NO: 8785 - protein, 98 aa, Homo sapiens
EVQLVESGGGLVQPGGSLRLSCEASGFTFSTYSMNWVRQAPGKGLEWVAYISSTSGSKYYADTVKGRFTISRDNAKNSLSLQMSSLRAEDTAVYFCVR

SEQ ID NO: 8786 - protein, 123 aa, Homo sapiens
EVQLVESGGGLVQPGGSLRLSCEASGFTFSTYSMNWVRQAPGKGLEWVAYISSTSGSKYYADTVKGRFTISRDNAKNSLSLQMSSLRAEDTAVYFCVRVGGVLGASLGRNDYWGQGTLVTVSS

SEQ ID NO: 8787 - protein, 98 aa, Homo sapiens
EVQLVESGGGLVQPGGSLRLSCIASGFRFSSYWMKWVRQAPGKGLEWVANINKDGSEKYYVDSVKGRFTIFRDNAKNSVYLQMNSLRVEDTAFYYCAG

SEQ ID NO: 8788 - protein, 117 aa, Homo sapiens
EVQLVESGGGLVQPGGSLRLSCIASGFRFSSYWMKWVRQAPGKGLEWVANINKDGSEKYYVDSVKGRFTIFRDNAKNSVYLQMNSLRVEDTAFYYCAGDSKGSYDYRGQGTPVTVSS

SEQ ID NO: 8789 - protein, 98 aa, Homo sapiens
EVQLVESGGGLVQPGGSLRLSCIASGFTFSNYEMNWVRQAPGKGLEWVSYMDSRGNAIYYADSVKGRFTISRDNAKNSLYLQMNSLRAEDTAVYYCAR

SEQ ID NO: 8790 - protein, 116 aa, Homo sapiens
EVQLVESGGGLVQPGGSLRLSCIASGFTFSNYEMNWVRQAPGKGLEWVSYMDSRGNAIYYADSVKGRFTISRDNAKNSLYLQMNSLRAEDTAVYYCARGPWTLDYWGQGTLVTVSS

SEQ ID NO: 8791 - protein, 98 aa, Homo sapiens
EVQLVESGGGLVQPGGSLRLSCKGSGFKFSDYWMSWVRQAPGKGLEWVADIHGDGSKKYYLDSVKGRFTISRDNAENSLYLEMNSLRADDTAIYYCVR

SEQ ID NO: 8792 - protein, 125 aa, Homo sapiens
EVQLVESGGGLVQPGGSLRLSCKGSGFKFSDYWMSWVRQAPGKGLEWVADIHGDGSKKYYLDSVKGRFTISRDNAENSLYLEMNSLRADDTAIYYCVRDDYCPRGVCSNLYFDHWGPGIVVTVSS

SEQ ID NO: 8793 - protein, 98 aa, Homo sapiens
EVQLVESGGGLVQPGGSLRLSCSASGFIFRNYGMSWVRQAPGKGLEWVSSITFTGGSRYYADSVKGRFTISRDQSKNTLFLQMNSLRADDTAVYYCAK

SEQ ID NO: 8794 - protein, 123 aa, Homo sapiens
EVQLVESGGGLVQPGGSLRLSCSASGFIFRNYGMSWVRQAPGKGLEWVSSITFTGGSRYYADSVKGRFTISRDQSKNTLFLQMNSLRADDTAVYYCAKDRSLTIPDSGTFDSWGQGTLVTVSS

SEQ ID NO: 8795 - protein, 98 aa, Homo sapiens
EVQLVESGGGLVQPGGSLRLSCSASGFTFSSYSMNWVRQAPGKGLEWLSYISSSSGSKYYADSVKGRFTISRDNAKNLVYLQMSSLRADDAAMYYCAR

SEQ ID NO: 8796 - protein, 121 aa, Homo sapiens
EVQLVESGGGLVQPGGSLRLSCSASGFTFSSYSMNWVRQAPGKGLEWLSYISSSSGSKYYADSVKGRFTISRDNAKNLVYLQMSSLRADDAAMYYCARSDYAVFYYGMDVWGQGTTVTVSS

SEQ ID NO: 8797 - protein, 98 aa, Homo sapiens
EVQLVESGGGLVQPGGSLRLSCSISGFTFNSCAMHWVRQAPGTGLEFVSCLSRNADNIYYADSVRGRFTISRDSSKNTLYLQMSSLRSEDTAVYYCVK

SEQ ID NO: 8798 - protein, 120 aa, Homo sapiens
EVQLVESGGGLVQPGGSLRLSCSISGFTFNSCAMHWVRQAPGTGLEFVSCLSRNADNIYYADSVRGRFTISRDSSKNTLYLQMSSLRSEDTAVYYCVKGGYYNTSPLEQWGQGTLVTVSS

SEQ ID NO: 8799 - protein, 98 aa, Homo sapiens
EVQLVESGGGLVQPGGSLRLSCTASGFTFDTYWMAWVRQAPGKGLEYVANIKYDGSEKYYVGSVKGRFTVSRDNAKNSLYLQMIGLTSEDTAVYYCAR

SEQ ID NO: 8800 - protein, 119 aa, Homo sapiens
EVQLVESGGGLVQPGGSLRLSCTASGFTFDTYWMAWVRQAPGKGLEYVANIKYDGSEKYYVGSVKGRFTVSRDNAKNSLYLQMIGLTSEDTAVYYCARVIGGRYHADYWGRGTLVTVSS

SEQ ID NO: 8801 - protein, 97 aa, Homo sapiens
EVQLVESGGGLVQPGGSLRLSCTASGFTFSSYYMSWVRQAPGKGLEWVANINEDGGDKFYVDSVKGRFTISRDNAKNSLYLQMNSLRAEDTAVYYCA

SEQ ID NO: 8802 - protein, 118 aa, Homo sapiens
EVQLVESGGGLVQPGGSLRLSCTASGFTFSSYYMSWVRQAPGKGLEWVANINEDGGDKFYVDSVKGRFTISRDNAKNSLYLQMNSLRAEDTAVYYCATAWGIAAFDFWGQGTRVTVSS

SEQ ID NO: 8803 - protein, 98 aa, Homo sapiens
EVQLVESGGGLVQPGGSLRLSCTASGFTFTNFWMSWVRQAPGKGLEWVANMKQDGSEKYYVDSVKGRFTISRDNAKNSLYLQMNSLRVEDTAVYYCAR

SEQ ID NO: 8804 - protein, 125 aa, Homo sapiens
EVQLVESGGGLVQPGGSLRLSCTASGFTFTNFWMSWVRQAPGKGLEWVANMKQDGSEKYYVDSVKGRFTISRDNAKNSLYLQMNSLRVEDTAVYYCAREPQDSFESTAYRGLGYWGQGTLVTVSS

SEQ ID NO: 8805 - protein, 98 aa, Homo sapiens
EVQLVESGGGLVQPGGSLRLSCTASGINFVGYWMSWVRQAPGKGLEWVANLNQRGSEKYYVDSVRGRFTISRDNAKNSLYLQMNSLRVEDSAVYYCAR

SEQ ID NO: 8806 - protein, 127 aa, Homo sapiens
EVQLVESGGGLVQPGGSLRLSCTASGINFVGYWMSWVRQAPGKGLEWVANLNQRGSEKYYVDSVRGRFTISRDNAKNSLYLQMNSLRVEDSAVYYCARDDGWEPQRRGEGPYFFDYWGQGTLVTVSS

SEQ ID NO: 8807 - protein, 98 aa, Homo sapiens
EVQLVESGGGLVQPGGSLRLSCTTSGFNFSRYWMIWVRQAPGKGLEWVANIKEDGSQKHYVDSVKGRFTISRDNAKNSLSLQMNSVGAEDAAVYYCAR

SEQ ID NO: 8808 - protein, 124 aa, Homo sapiens
EVQLVESGGGLVQPGGSLRLSCTTSGFNFSRYWMIWVRQAPGKGLEWVANIKEDGSQKHYVDSVKGRFTISRDNAKNSLSLQMNSVGAEDAAVYYCARLYYYEKRDCYRHFDNWGQGTLVTVSS

SEQ ID NO: 8809 - protein, 96 aa, Homo sapiens
EVQLVESGGGLVQPGGSLRLSCTVSGFTFSSYEMNWVRQTPGKGLEWLSYISSGGDTRFYADSVKGRFTVSRDNAKNSLYLQMHGLRVADTAVYYC

SEQ ID NO: 8810 - protein, 116 aa, Homo sapiens
EVQLVESGGGLVQPGGSLRLSCTVSGFTFSSYEMNWVRQTPGKGLEWLSYISSGGDTRFYADSVKGRFTVSRDNAKNSLYLQMHGLRVADTAVYYCVAGPTTFDYWGQGTLVTVSS

SEQ ID NO: 8811 - protein, 98 aa, Homo sapiens
EVQLVESGGGLVQPGGSLRLSCVASGFLLSDYYMDWVRQAPGKGPEWVGCIRRNANDGTTEYAASVKGRMSISRDDSKNTMYLQINRLKTEDTAVYYC

SEQ ID NO: 8812 - protein, 123 aa, Homo sapiens
EVQLVESGGGLVQPGGSLRLSCVASGFLLSDYYMDWVRQAPGKGPEWVGCIRRNANDGTTEYAASVKGRMSISRDDSKNTMYLQINRLKTEDTAVYYCSICSNTGDDWYNRYWGQGTQVTVSS

SEQ ID NO: 8813 - protein, 98 aa, Homo sapiens
EVQLVESGGGLVQPGGSLRLSCVASGFSFSGYSMNWVRQAPGKGLEWVSYISSSSLSKYYADSVKGRFTISRDNAKNSLYLQMSSLRADDTAVYYCVR

SEQ ID NO: 8814 - protein, 123 aa, Homo sapiens
EVQLVESGGGLVQPGGSLRLSCVASGFSFSGYSMNWVRQAPGKGLEWVSYISSSSLSKYYADSVKGRFTISRDNAKNSLYLQMSSLRADDTAVYYCVRVGGVLGATLGHNDYWGQGTLVTVSS

SEQ ID NO: 8815 - protein, 98 aa, Homo sapiens
EVQLVESGGGLVQPGGSLRLSCVASGFTFGNFWINWVRQAPGKGLEWVANIKDDGSEKYYADSVKGRVTISRDNAQNTAYLEMNSLRVEDTALYHCAR

SEQ ID NO: 8816 - protein, 118 aa, Homo sapiens
EVQLVESGGGLVQPGGSLRLSCVASGFTFGNFWINWVRQAPGKGLEWVANIKDDGSEKYYADSVKGRVTISRDNAQNTAYLEMNSLRVEDTALYHCARVEYNYAFDSWGQGTLVTVSS

SEQ ID NO: 8817 - protein, 98 aa, Homo sapiens
EVQLVESGGGLVQPGGSLRLSCVASGFTFNTYWMSWVRQAPGKGLEWVASIKQDGSEKKYVDSVRGRFTISRDNAKNAVDLQIDSLRAEDMAVYYCVR

SEQ ID NO: 8818 - protein, 126 aa, Homo sapiens
EVQLVESGGGLVQPGGSLRLSCVASGFTFNTYWMSWVRQAPGKGLEWVASIKQDGSEKKYVDSVRGRFTISRDNAKNAVDLQIDSLRAEDMAVYYCVRDFSPHCDGDCYTDFFASWGQGTLVSVSS

SEQ ID NO: 8819 - protein, 98 aa, Homo sapiens
EVQLVESGGGLVQPGGSLRLSCVASGFTFRSHWMSWVRQAPGEGLEWVANIKQDGSEKNYVDSVKGRFTISRDNTKNSLYLQIKSLRAEDTAVYFCAR

SEQ ID NO: 8820 - protein, 125 aa, Homo sapiens
EVQLVESGGGLVQPGGSLRLSCVASGFTFRSHWMSWVRQAPGEGLEWVANIKQDGSEKNYVDSVKGRFTISRDNTKNSLYLQIKSLRAEDTAVYFCARSMNELVPLSFYYYMDVWGKGTTVIVSS

SEQ ID NO: 8821 - protein, 97 aa, Homo sapiens
EVQLVESGGGLVQPGGSLRLSCVASGFTFRSYEMNWVRQAPGKGLQWVSYISRSGSTIYYSDSVKGRFTISRDNAKNSLYLQMNSLRAEDTAIYYCA

SEQ ID NO: 8822 - protein, 116 aa, Homo sapiens
EVQLVESGGGLVQPGGSLRLSCVASGFTFRSYEMNWVRQAPGKGLQWVSYISRSGSTIYYSDSVKGRFTISRDNAKNSLYLQMNSLRAEDTAIYYCATGSTLLDYWGPGTLVTVSS

SEQ ID NO: 8823 - protein, 98 aa, Homo sapiens
EVQLVESGGGLVQPGGSLRLSCVASGFTFRSYWMTWVRQAPGKGLEWVANINQDGSGKEYVDSVKGRFTISRDNAENSLYLQMNSLRAEDTAVYYCAR

SEQ ID NO: 8824 - protein, 121 aa, Homo sapiens
EVQLVESGGGLVQPGGSLRLSCVASGFTFRSYWMTWVRQAPGKGLEWVANINQDGSGKEYVDSVKGRFTISRDNAENSLYLQMNSLRAEDTAVYYCARDPYSDIYGAFDIWGQGTVVTVSS

SEQ ID NO: 8825 - protein, 98 aa, Homo sapiens
EVQLVESGGGLVQPGGSLRLSCVASGFTFSNFGMHWVRQAPGKGLEWVSYISTSSLSTYYADSVKGRFIISRDNAKNSLYLQMNRLRAEDTAVYYCAR

SEQ ID NO: 8826 - protein, 123 aa, Homo sapiens
EVQLVESGGGLVQPGGSLRLSCVASGFTFSNFGMHWVRQAPGKGLEWVSYISTSSLSTYYADSVKGRFIISRDNAKNSLYLQMNRLRAEDTAVYYCAREGGVVGPTLGRIDYWGRGTLVTVSS

SEQ ID NO: 8827 - protein, 98 aa, Homo sapiens
EVQLVESGGGLVQPGGSLRLSCVASGFTFSNYWMSWVRQAPGKGLEWVANIKHDGTESFSVDSVKGRFTLSRDNARNSLYLQMNGLRAEDTAVYYCAR

SEQ ID NO: 8828 - protein, 124 aa, Homo sapiens
EVQLVESGGGLVQPGGSLRLSCVASGFTFSNYWMSWVRQAPGKGLEWVANIKHDGTESFSVDSVKGRFTLSRDNARNSLYLQMNGLRAEDTAVYYCARIFHFENGGYYRHFDCWGQGTQVTVSS

SEQ ID NO: 8829 - protein, 97 aa, Homo sapiens
EVQLVESGGGLVQPGGSLRLSCVASGFTFSRNWMSWVRQAPGKGLEWVASIKQDGSQRHYVDSVEGRFNISRDNAKKSLSLQMNSLRAEDTALYYCV

SEQ ID NO: 8830 - protein, 121 aa, Homo sapiens
EVQLVESGGGLVQPGGSLRLSCVASGFTFSRNWMSWVRQAPGKGLEWVASIKQDGSQRHYVDSVEGRFNISRDNAKKSLSLQMNSLRAEDTALYYCVRLREDTAYRPCDQWGQGTLVTVSS

SEQ ID NO: 8831 - protein, 98 aa, Homo sapiens
EVQLVESGGGLVQPGGSLRLSCVASGFTFSSYSMNWVRQAPGKGLEWVSYISSSSLSIYYADSVKGRFTISRDNGKNSLYLQMNRLRGEETAVYYCAR

SEQ ID NO: 8832 - protein, 123 aa, Homo sapiens
EVQLVESGGGLVQPGGSLRLSCVASGFTFSSYSMNWVRQAPGKGLEWVSYISSSSLSIYYADSVKGRFTISRDNGKNSLYLQMNRLRGEETAVYYCARVGGVLGATLGRNDYWGQGTLVTVSS

SEQ ID NO: 8833 - protein, 98 aa, Homo sapiens
EVQLVESGGGLVQPGGSLRLSCVASGFTFSSYWMSWVRQTPGKGLEWVANIQREGYEKNYVDSVKGRFTISRDNAKNSLYLQMDSLRAEDTAVYYCAR

SEQ ID NO: 8834 - protein, 116 aa, Homo sapiens
EVQLVESGGGLVQPGGSLRLSCVASGFTFSSYWMSWVRQTPGKGLEWVANIQREGYEKNYVDSVKGRFTISRDNAKNSLYLQMDSLRAEDTAVYYCAREEYLYDYWGQGTLVTVSS

SEQ ID NO: 8835 - protein, 98 aa, Homo sapiens
EVQLVESGGGLVQPGGSLRLSCVASGFTFSTYSMNWVRQAPGKGLEWVSYISGSSLSTYYADSAKGRFTISRDNAKNSLYLQMNSLRAEDTAVYYCAR

SEQ ID NO: 8836 - protein, 123 aa, Homo sapiens
EVQLVESGGGLVQPGGSLRLSCVASGFTFSTYSMNWVRQAPGKGLEWVSYISGSSLSTYYADSAKGRFTISRDNAKNSLYLQMNSLRAEDTAVYYCARVGGVLGATLGRNDYWGQGTLVTVSS

SEQ ID NO: 8837 - protein, 98 aa, Homo sapiens
EVQLVESGGGLVQPGGSLRLSCVASGFTLSTYWMTWVRQAPGKGLEWVATIKEDGRETYYVDSVKGRFTISRDNAKNSLFLLMNALRAEDTATYYCAR

SEQ ID NO: 8838 - protein, 121 aa, Homo sapiens
EVQLVESGGGLVQPGGSLRLSCVASGFTLSTYWMTWVRQAPGKGLEWVATIKEDGRETYYVDSVKGRFTISRDNAKNSLFLLMNALRAEDTATYYCARNLHSDNTWYLGDFWGQGARVTVS

SEQ ID NO: 8839 - protein, 97 aa, Homo sapiens
EVQLVESGGGLVQPGGSLRLSCVASGLSFSKTYMSWVRQAPGWGLEWVANIKEDGSEEYYVDSVKGRFRVSRDNAKNSLYLQMNSLRAEDTAVYYCG

SEQ ID NO: 8840 - protein, 115 aa, Homo sapiens
EVQLVESGGGLVQPGGSLRLSCVASGLSFSKTYMSWVRQAPGWGLEWVANIKEDGSEEYYVDSVKGRFRVSRDNAKNSLYLQMNSLRAEDTAVYYCGSFYPGDYRGQGTLVTVSS

SEQ ID NO: 8841 - protein, 98 aa, Homo sapiens
EVQLVESGGGLVQPGGSLRLSCVTSGFNFGNYWMTWVRQSPRKGLEWVASIKKDGSEKYYVKSVKGRFTIYRDNVRNSVFLQLDSLRVDDAAVYYCAR

SEQ ID NO: 8842 - protein, 124 aa, Homo sapiens
EVQLVESGGGLVQPGGSLRLSCVTSGFNFGNYWMTWVRQSPRKGLEWVASIKKDGSEKYYVKSVKGRFTIYRDNVRNSVFLQLDSLRVDDAAVYYCARMDDFESGTYYRFFGPWGQGTLVTVSS

SEQ ID NO: 8843 - protein, 98 aa, Homo sapiens
EVQLVESGGGLVQPGGSLRLTCATSGFTFGDYWMSWLRQTPGKGLEWVAYIKRDGSEENYVDSVRGRFTISRDNARNTVYLQMNSLRVDDTAVYYCGR

SEQ ID NO: 8844 - protein, 116 aa, Homo sapiens
EVQLVESGGGLVQPGGSLRLTCATSGFTFGDYWMSWLRQTPGKGLEWVAYIKRDGSEENYVDSVRGRFTISRDNARNTVYLQMNSLRVDDTAVYYCGRAERLLDYWGQGTLVTVSS

SEQ ID NO: 8845 - protein, 100 aa, Homo sapiens
EVQLVESGGGLVQPGGSLRVSCAASGFSFSDYYMHWVRQAPGKGLEWVARIRNKANSYITEYGASMRGRFTISRDDSKNSVFLQINSLKIEDTAVYYCAR

SEQ ID NO: 8846 - protein, 121 aa, Homo sapiens
EVQLVESGGGLVQPGGSLRVSCAASGFSFSDYYMHWVRQAPGKGLEWVARIRNKANSYITEYGASMRGRFTISRDDSKNSVFLQINSLKIEDTAVYYCARDSGGGAYFDYWGQGTLVIVSS

SEQ ID NO: 8847 - protein, 98 aa, Homo sapiens
EVQLVESGGGLVQPGGSLRVSCEVSGFTFSSYWMSWVRQAPGKGLEWVANIKQDGSEKYYVDSVKGRFTISRDNAKNSLYLQMNSLRAEDTAVYYCAR

SEQ ID NO: 8848 - protein, 121 aa, Homo sapiens
EVQLVESGGGLVQPGGSLRVSCEVSGFTFSSYWMSWVRQAPGKGLEWVANIKQDGSEKYYVDSVKGRFTISRDNAKNSLYLQMNSLRAEDTAVYYCARARGFGEEYYFDYWGQGTLVTVSS

SEQ ID NO: 8849 - protein, 98 aa, Homo sapiens
EVQLVESGGGLVQPGGSLSLSCKASGFAFSSYWMNWVRQAPGKGLEWVANIKEDESEKYYVDSVRGRFTISRDNAKNSLFLQMNSLRADDTALYYCAR

SEQ ID NO: 8850 - protein, 118 aa, Homo sapiens
EVQLVESGGGLVQPGGSLSLSCKASGFAFSSYWMNWVRQAPGKGLEWVANIKEDESEKYYVDSVRGRFTISRDNAKNSLFLQMNSLRADDTALYYCARAGFGVPFDYWGQGTLVTVSS

SEQ ID NO: 8851 - protein, 98 aa, Homo sapiens
EVQLVESGGGLVQPGGSLTLSCAVSGFTFGNYWMSWVRQAPGKGLEWVANIKQDGSELKYVESVKGRFTIFRDNGRNSLYLLMNSLRAEDTAVYYCAR

SEQ ID NO: 8852 - protein, 120 aa, Homo sapiens
EVQLVESGGGLVQPGGSLTLSCAVSGFTFGNYWMSWVRQAPGKGLEWVANIKQDGSELKYVESVKGRFTIFRDNGRNSLYLLMNSLRAEDTAVYYCARGTDSAATRVDAWGQGTTVTVSS

SEQ ID NO: 8853 - protein, 98 aa, Homo sapiens
EVQLVESGGGLVQPGGSLTLSCAVSGFTFGNYWMSWVRQAPGKGLEWVANIKQDGSELNYVDSVKGRFTIFRDNGRNSLYLLMNSLRAEDTAVYYCAR

SEQ ID NO: 8854 - protein, 120 aa, Homo sapiens
EVQLVESGGGLVQPGGSLTLSCAVSGFTFGNYWMSWVRQAPGKGLEWVANIKQDGSELNYVDSVKGRFTIFRDNGRNSLYLLMNSLRAEDTAVYYCARGTDSAATRVDAWGQGTTVTVSS

SEQ ID NO: 8855 - protein, 98 aa, Homo sapiens
EVQLVESGGGLVQPGGSRRLSCAVSGFTFSSYWMSWVRQAPGKGLEWVASIKQDGSEKQYGGSVKGRFTISRDNAKNSLYLQMNSLRAEDTAVYFCAR

SEQ ID NO: 8856 - protein, 117 aa, Homo sapiens
EVQLVESGGGLVQPGGSRRLSCAVSGFTFSSYWMSWVRQAPGKGLEWVASIKQDGSEKQYGGSVKGRFTISRDNAKNSLYLQMNSLRAEDTAVYFCARVSSLLLWAWGQGTLVTVSS

SEQ ID NO: 8857 - protein, 98 aa, Homo sapiens
EVQLVESGGGLVQPGGTLRLSCAASGFTFSSYGMSWVRQAPGKGLEWVSAISGSGGSTYYADSVKGRFTISRDNSKNTLYLQMNSLRAEDTAVYYCAK

SEQ ID NO: 8858 - protein, 128 aa, Homo sapiens
EVQLVESGGGLVQPGGTLRLSCAASGFTFSSYGMSWVRQAPGKGLEWVSAISGSGGSTYYADSVKGRFTISRDNSKNTLYLQMNSLRAEDTAVYYCAKGPFYYYDSSGYPDLDAFDIWGQGTMVTVSS

SEQ ID NO: 8859 - protein, 123 aa, Homo sapiens
EVQLVESGGGLVQPGGTLRLSCAASGFTFSSYGMSWVRQAPGKGLEWVSAISGSGGSTYYADSVKGRFTISRDNSKNTLYLQMNSLRAEDTAVYYCAKSFLVAVADFYYFDYWGQGTLVTVSS

SEQ ID NO: 8860 - protein, 125 aa, Homo sapiens
EVQLVESGGGLVQPGGTLRLSCAASGFTFSSYGMSWVRQAPGKGLEWVSAISGSGGSTYYADSVKGRFTISRDNSKNTLYLQMNSLRAEDTAVYYCAKTSPPRAVAGRRDAFDIWGQGTMVTVSS

SEQ ID NO: 8861 - protein, 116 aa, Homo sapiens
EVQLVESGGGLVQPGGTLRLSCAASGFTFSSYGMSWVRQAPGKGLEWVSAISGSGGSTYYADSVKGRFTISRDNSKNTLYLQMNSLRAEDTAVYYCAKVVHPMDVWGKGTTVTVSS

SEQ ID NO: 8862 - protein, 119 aa, Homo sapiens
EVQLVESGGGLVQPGGTLRLSCAASGFTFSSYGMSWVRQAPGKGLEWVSAISGSGGSTYYADSVKGRFTISRDNSKNTLYLQMNSLRAEDTAVYYCAKYSDYGPPSGDWGQGTMVTVSS

SEQ ID NO: 8863 - protein, 98 aa, Homo sapiens
EVQLVESGGGLVQPGGTLRLSCAASGFTFSSYGMSWVRQAPGKGLEWVSAISGSGGSTYYADSVKGRFTISRDNSKNTLYLQMNSLRAEDTAVYYCAN

SEQ ID NO: 8864 - protein, 122 aa, Homo sapiens
EVQLVESGGGLVQPGGTLRLSCAASGFTFSSYGMSWVRQAPGKGLEWVSAISGSGGSTYYADSVKGRFTISRDNSKNTLYLQMNSLRAEDTAVYYCANDRSRRPPWYGFDYWGQGTLVTVSS

SEQ ID NO: 8865 - protein, 98 aa, Homo sapiens
EVQLVESGGGLVQPGGTLRLSCAASGFTFSSYGMSWVRQAPGKGLEWVSAISGTGISTYYADSVKGRFTISRDNSKNTLYLQMNSLRAEDTAVYYCAK

SEQ ID NO: 8866 - protein, 123 aa, Homo sapiens
EVQLVESGGGLVQPGGTLRLSCAASGFTFSSYGMSWVRQAPGKGLEWVSAISGTGISTYYADSVKGRFTISRDNSKNTLYLQMNSLRAEDTAVYYCAKPVATPVYLSGLFDYWGQGTLVTVSS

SEQ ID NO: 8867 - protein, 98 aa, Homo sapiens
EVQLVESGGGLVQPGGTLRLSCAASGFTFSTYGMHWVRQAPGKGLEWVSSISATAGSTYYAESVKGRFTISRDNSKKTVFLQMNGLRAGDTAVYYCAK

SEQ ID NO: 8868 - protein, 123 aa, Homo sapiens
EVQLVESGGGLVQPGGTLRLSCAASGFTFSTYGMHWVRQAPGKGLEWVSSISATAGSTYYAESVKGRFTISRDNSKKTVFLQMNGLRAGDTAVYYCAKDYSEFIPVAGALDYWGRGTLVTVSS

SEQ ID NO: 8869 - protein, 98 aa, Homo sapiens
EVQLVESGGGLVQPGGTLRLSCVASGFTLSNYGMNWVRQAPGKGLEWVSSISGTGGSSYYADAVKGRFTISRDISRNTLYLQMSGLRAEDTAVYYCAK

SEQ ID NO: 8870 - protein, 123 aa, Homo sapiens
EVQLVESGGGLVQPGGTLRLSCVASGFTLSNYGMNWVRQAPGKGLEWVSSISGTGGSSYYADAVKGRFTISRDISRNTLYLQMSGLRAEDTAVYYCAKDRSNYVVYYGYFDSWGQGTLVTVSS

SEQ ID NO: 8871 - protein, 99 aa, Homo sapiens
EVQLVESGGGLVQPGKSLRLSCAASGFSFEDYAIHWVRQAPGKGLEWVSGISWNSGRIGYVDSVKGRFTISRDNAKNSVYLQMNSLRAGDTAFYYCVKD

SEQ ID NO: 8872 - protein, 122 aa, Homo sapiens
EVQLVESGGGLVQPGKSLRLSCAASGFSFEDYAIHWVRQAPGKGLEWVSGISWNSGRIGYVDSVKGRFTISRDNAKNSVYLQMNSLRAGDTAFYYCVKDGRRWLQFNYFDYWGQGALVTVSS

SEQ ID NO: 8873 - protein, 97 aa, Homo sapiens
EVQLVESGGGLVQPGKSLRLSCLTSGFRFSDYVMHWVRQTPEKGLQYVSGIGVFGGVTNYVESVKGRFTVTRDDSKGTMDLHMDNLRPEDTGIYHCV

SEQ ID NO: 8874 - protein, 125 aa, Homo sapiens
EVQLVESGGGLVQPGKSLRLSCLTSGFRFSDYVMHWVRQTPEKGLQYVSGIGVFGGVTNYVESVKGRFTVTRDDSKGTMDLHMDNLRPEDTGIYHCVKGENFGMGTYIGVWFDPWGQGAPVTVSS

SEQ ID NO: 8875 - protein, 98 aa, Homo sapiens
EVQLVESGGGLVQPGKSLRLSCVVSGFTFSSYSMNWVRQAPGKGLEWVSYISSSSLSKYYGDSVKGRFTISRDNAKNSLYLQMNSLRAEDTAVYYCAR

SEQ ID NO: 8876 - protein, 123 aa, Homo sapiens
EVQLVESGGGLVQPGKSLRLSCVVSGFTFSSYSMNWVRQAPGKGLEWVSYISSSSLSKYYGDSVKGRFTISRDNAKNSLYLQMNSLRAEDTAVYYCARVGGVLGATLGRNDNWGQGIRVTVSS

SEQ ID NO: 8877 - protein, 98 aa, Homo sapiens
EVQLVESGGGLVQPGRSLRISCAASGFIFDDYAMQWARQAPGKGLEWVSGISWNSGSIGYADSVKGRFTISRDNAKSSLFLQMNSLRPEDTALYYCAK

SEQ ID NO: 8878 - protein, 119 aa, Homo sapiens
EVQLVESGGGLVQPGRSLRISCAASGFIFDDYAMQWARQAPGKGLEWVSGISWNSGSIGYADSVKGRFTISRDNAKSSLFLQMNSLRPEDTALYYCAKAHGSGSYSLSWGQGTLVTVSS

SEQ ID NO: 8879 - protein, 99 aa, Homo sapiens
EVQLVESGGGLVQPGRSLRLACTTSGFTFEDYAMNWVRQAPGKGPEWVSGITWNSRNIGYGGSVKGRFIISRDNAKKSLYLQMNSLRAEDTAFYYCVKD

SEQ ID NO: 8880 - protein, 122 aa, Homo sapiens
EVQLVESGGGLVQPGRSLRLACTTSGFTFEDYAMNWVRQAPGKGPEWVSGITWNSRNIGYGGSVKGRFIISRDNAKKSLYLQMNSLRAEDTAFYYCVKDGRRWLQFNWFDSWGQGTLVTVSS

SEQ ID NO: 8881 - protein, 97 aa, Homo sapiens
EVQLVESGGGLVQPGRSLRLSCAASGFIFDDYAMQWVRQAPGKGLEWVSGISWDNGAIGYAGFVKGRFIISRDNAKNSLYLQMNSLRTEDTAFYYCA

SEQ ID NO: 8882 - protein, 119 aa, Homo sapiens
EVQLVESGGGLVQPGRSLRLSCAASGFIFDDYAMQWVRQAPGKGLEWVSGISWDNGAIGYAGFVKGRFIISRDNAKNSLYLQMNSLRTEDTAFYYCAKANGAGSYILSWGQGTLVTVSS

SEQ ID NO: 8883 - protein, 99 aa, Homo sapiens
EVQLVESGGGLVQPGRSLRLSCAASGFIFDDYVMHWVRQAPGKGLEWVSGIGWNSGNIAYADSVKGRFTISRDNAKNSLYLQMTDLRAEDTALYYCARD

SEQ ID NO: 8884 - protein, 121 aa, Homo sapiens
EVQLVESGGGLVQPGRSLRLSCAASGFIFDDYVMHWVRQAPGKGLEWVSGIGWNSGNIAYADSVKGRFTISRDNAKNSLYLQMTDLRAEDTALYYCARDRRIVATYHFDSWGQGTLVTVSS

SEQ ID NO: 8885 - protein, 98 aa, Homo sapiens
EVQLVESGGGLVQPGRSLRLSCAASGFNFDDYAMHWVRQLPGKGLQWVSGISWNSATIHYVDSVKGRFTISRDNARNSLYLQMNSLRTEDTALYYCTK

SEQ ID NO: 8886 - protein, 124 aa, Homo sapiens
EVQLVESGGGLVQPGRSLRLSCAASGFNFDDYAMHWVRQLPGKGLQWVSGISWNSATIHYVDSVKGRFTISRDNARNSLYLQMNSLRTEDTALYYCTKDFYHDSSGTTAPIDHWGQGTPVTVVS

SEQ ID NO: 8887 - protein, 98 aa, Homo sapiens
EVQLVESGGGLVQPGRSLRLSCAASGFTFDDFAMHWVRQAPGKGLEWLSGISWDSGAIGYAASVEGRFTISRDNAKNSLFLQMNSLRAEDTAFYFCAR

SEQ ID NO: 8888 - protein, 119 aa, Homo sapiens
EVQLVESGGGLVQPGRSLRLSCAASGFTFDDFAMHWVRQAPGKGLEWLSGISWDSGAIGYAASVEGRFTISRDNAKNSLFLQMNSLRAEDTAFYFCARGAGSGSYSDYWGQGTLVAVSS

SEQ ID NO: 8889 - protein, 97 aa, Homo sapiens
EVQLVESGGGLVQPGRSLRLSCAASGFTFDDHAMHWVRQAPGKGLEWVSGISWDSGSIGYAESFKGRFTISRDNAKNSLYLQMNSLRAEDTAIYYCG

SEQ ID NO: 8890 - protein, 119 aa, Homo sapiens
EVQLVESGGGLVQPGRSLRLSCAASGFTFDDHAMHWVRQAPGKGLEWVSGISWDSGSIGYAESFKGRFTISRDNAKNSLYLQMNSLRAEDTAIYYCGKAYGSGSYTSDWGQGTLVTVSS

SEQ ID NO: 8891 - protein, 99 aa, Homo sapiens
EVQLVESGGGLVQPGRSLRLSCAASGFTFDDHAMHWVRQAPGKGLEWVSGISWNSGSIGYADSVKGRFTISRDNAKNSLYLQMNSLRAEDTALYYCAKD

SEQ ID NO: 8892 - protein, 124 aa, Homo sapiens
EVQLVESGGGLVQPGRSLRLSCAASGFTFDDHAMHWVRQAPGKGLEWVSGISWNSGSIGYADSVKGRFTISRDNAKNSLYLQMNSLRAEDTALYYCAKDIAAAGTGFYYGLDVWGQGTTVTVSS

SEQ ID NO: 8893 - protein, 97 aa, Homo sapiens
EVQLVESGGGLVQPGRSLRLSCAASGFTFDDYAMHWVRQAPGKGLDWVSGISWNSGSIAYADSVKGRFTISRDNAKNSLFLQMNSLRAEDTALYYCA

SEQ ID NO: 8894 - protein, 117 aa, Homo sapiens
EVQLVESGGGLVQPGRSLRLSCAASGFTFDDYAMHWVRQAPGKGLDWVSGISWNSGSIAYADSVKGRFTISRDNAKNSLFLQMNSLRAEDTALYYCASSGGRENDYWGQGTLVTVSS

SEQ ID NO: 8895 - protein, 99 aa, Homo sapiens
EVQLVESGGGLVQPGRSLRLSCAASGFTFDDYAMHWVRQAPGKGLEWVSGISWNSGSIGYADSVKGRFTISRDNAKNSLYLQMNSLRAEDMALYYCAKD

SEQ ID NO: 8896 - protein, 122 aa, Homo sapiens
EVQLVESGGGLVQPGRSLRLSCAASGFTFDDYAMHWVRQAPGKGLEWVSGISWNSGSIGYADSVKGRFTISRDNAKNSLYLQMNSLRAEDMALYYCAKDTSFSITMVGFDYWGQGTLVTVSS

SEQ ID NO: 8897 - protein, 98 aa, Homo sapiens
EVQLVESGGGLVQPGRSLRLSCAASGFTFDDYAMHWVRQAPGKGLEWVSGISWNSGSIGYADSVKGRFTISRDNAKNSLYLQMNSLRAEDTAFYYCAK

SEQ ID NO: 8898 - protein, 119 aa, Homo sapiens
EVQLVESGGGLVQPGRSLRLSCAASGFTFDDYAMHWVRQAPGKGLEWVSGISWNSGSIGYADSVKGRFTISRDNAKNSLYLQMNSLRAEDTAFYYCAKAHGSGSYSLRWGQGTLVTVSS

SEQ ID NO: 8899 - protein, 98 aa, Homo sapiens
EVQLVESGGGLVQPGRSLRLSCAASGFTFDDYAMHWVRQAPGKGLEWVSGISWNSGSIGYADSVKGRFTISRDNAKNSLYLQMNSLRAEDTALYYCAK

SEQ ID NO: 8900 - protein, 124 aa, Homo sapiens
EVQLVESGGGLVQPGRSLRLSCAASGFTFDDYAMHWVRQAPGKGLEWVSGISWNSGSIGYADSVKGRFTISRDNAKNSLYLQMNSLRAEDTALYYCAKAESWDSSGWSGYFDYWGQGTLVTVSS

SEQ ID NO: 8901 - protein, 99 aa, Homo sapiens
EVQLVESGGGLVQPGRSLRLSCAASGFTFDDYAMHWVRQAPGKGLEWVSGISWNSGSIGYADSVKGRFTISRDNAKNSLYLQMNSLRAEDTALYYCAKD

SEQ ID NO: 8902 - protein, 122 aa, Homo sapiens
EVQLVESGGGLVQPGRSLRLSCAASGFTFDDYAMHWVRQAPGKGLEWVSGISWNSGSIGYADSVKGRFTISRDNAKNSLYLQMNSLRAEDTALYYCAKDGDWQLARGYFDYWGQGTLVTVSS

SEQ ID NO: 8903 - protein, 125 aa, Homo sapiens
EVQLVESGGGLVQPGRSLRLSCAASGFTFDDYAMHWVRQAPGKGLEWVSGISWNSGSIGYADSVKGRFTISRDNAKNSLYLQMNSLRAEDTALYYCAKDGGGYELWFGENWFDPWGQGTLVTVSS

SEQ ID NO: 8904 - protein, 123 aa, Homo sapiens
EVQLVESGGGLVQPGRSLRLSCAASGFTFDDYAMHWVRQAPGKGLEWVSGISWNSGSIGYADSVKGRFTISRDNAKNSLYLQMNSLRAEDTALYYCAKDGLDSSSWSGSFDYWGQGTLVTVSS

SEQ ID NO: 8905 - protein, 123 aa, Homo sapiens
EVQLVESGGGLVQPGRSLRLSCAASGFTFDDYAMHWVRQAPGKGLEWVSGISWNSGSIGYADSVKGRFTISRDNAKNSLYLQMNSLRAEDTALYYCAKDKTHSSSWYGAFDYWGQGTLVTVSS

SEQ ID NO: 8906 - protein, 122 aa, Homo sapiens
EVQLVESGGGLVQPGRSLRLSCAASGFTFDDYAMHWVRQAPGKGLEWVSGISWNSGSIGYADSVKGRFTISRDNAKNSLYLQMNSLRAEDTALYYCAKDTYYYDSSGLMDIWGQGTMVTVSS

SEQ ID NO: 8907 - protein, 122 aa, Homo sapiens
EVQLVESGGGLVQPGRSLRLSCAASGFTFDDYAMHWVRQAPGKGLEWVSGISWNSGSIGYADSVKGRFTISRDNAKNSLYLQMNSLRAEDTALYYCAKGRRGSVVVAATDYWGQGTLVTVSS

SEQ ID NO: 8908 - protein, 99 aa, Homo sapiens
EVQLVESGGGLVQPGRSLRLSCAASGFTFDDYAMHWVRQAPGKGLEWVSGISWNSGSIGYGDSVKGRFTISRDNAKNSLYLQMNSLRAEDTALYYCAKD

SEQ ID NO: 8909 - protein, 123 aa, Homo sapiens
EVQLVESGGGLVQPGRSLRLSCAASGFTFDDYAMHWVRQAPGKGLEWVSGISWNSGSIGYGDSVKGRFTISRDNAKNSLYLQMNSLRAEDTALYYCAKDMLVAAAGTAGFEYWGQGTLVTVSS

SEQ ID NO: 8910 - protein, 99 aa, Homo sapiens
EVQLVESGGGLVQPGRSLRLSCAASGFTFDDYAMHWVRQVPGKGLEWVSGISWNSGGIGYADSVKGRFTISRDNAKNSLFLQMNSLRSEDTALYYCAKD

SEQ ID NO: 8911 - protein, 122 aa, Homo sapiens
EVQLVESGGGLVQPGRSLRLSCAASGFTFDDYAMHWVRQVPGKGLEWVSGISWNSGGIGYADSVKGRFTISRDNAKNSLFLQMNSLRSEDTALYYCAKDISFTAEDTYFDYWGQGTLVTVSS

SEQ ID NO: 8912 - protein, 98 aa, Homo sapiens
EVQLVESGGGLVQPGRSLRLSCAASGFTFDDYAMQWARQAPGKGLEWISGISWNSGSIGYADSVKGRFTISRDNAKSSLFLQMNSLRPEDTAFYYCAK

SEQ ID NO: 8913 - protein, 119 aa, Homo sapiens
EVQLVESGGGLVQPGRSLRLSCAASGFTFDDYAMQWARQAPGKGLEWISGISWNSGSIGYADSVKGRFTISRDNAKSSLFLQMNSLRPEDTAFYYCAKAHGSGSYSLRWGQGILVTVSS

SEQ ID NO: 8914 - protein, 97 aa, Homo sapiens
EVQLVESGGGLVQPGRSLRLSCAASGFTFEDYAMQWLRQAPGKGLEWVSGISWNSGSIGYAASLKGRFTISRDNAKNSLYLQMNSLRDEDTAFYYCA

SEQ ID NO: 8915 - protein, 120 aa, Homo sapiens
EVQLVESGGGLVQPGRSLRLSCAASGFTFEDYAMQWLRQAPGKGLEWVSGISWNSGSIGYAASLKGRFTISRDNAKNSLYLQMNSLRDEDTAFYYCAKAPYGSGSFVDYWGQGTLVTVSS

SEQ ID NO: 8916 - protein, 102 aa, Homo sapiens
EVQLVESGGGLVQPGRSLRLSCAASGFTFGDYAMSWVRQAPGKGLEWEWVGFIRSKASGGTTEYAASVKGRFTISRDDSKDIAYLQMNSLKTEDTAVYYCTR

SEQ ID NO: 8917 - protein, 123 aa, Homo sapiens
EVQLVESGGGLVQPGRSLRLSCAASGFTFGDYAMSWVRQAPGKGLEWEWVGFIRSKASGGTTEYAASVKGRFTISRDDSKDIAYLQMNSLKTEDTAVYYCTRDLRGARAFDIWGQGTMVTVSS

SEQ ID NO: 8918 - protein, 98 aa, Homo sapiens
EVQLVESGGGLVQPGRSLRLSCAASGFTFRSYSMNWVRQAPEKGLEWLAYISESSLSIYYADSVKGRFIISRDNAKNSVHLQMNSLRDEDTAVYYCAR

SEQ ID NO: 8919 - protein, 120 aa, Homo sapiens
EVQLVESGGGLVQPGRSLRLSCAASGFTFRSYSMNWVRQAPEKGLEWLAYISESSLSIYYADSVKGRFIISRDNAKNSVHLQMNSLRDEDTAVYYCARSRAAAYYYGLDVWGQGTTSPSP

SEQ ID NO: 8920 - protein, 100 aa, Homo sapiens
EVQLVESGGGLVQPGRSLRLSCTASGFRFGDYGVSWFRRAPGKGLEWIGFIRSKAQEGTTQRAASVKDRFTISRDDSKSIAYLQMNSLKTEDTAVYYCSR

SEQ ID NO: 8921 - protein, 123 aa, Homo sapiens
EVQLVESGGGLVQPGRSLRLSCTASGFRFGDYGVSWFRRAPGKGLEWIGFIRSKAQEGTTQRAASVKDRFTISRDDSKSIAYLQMNSLKTEDTAVYYCSRVDANWNHDAFDIWGQGTMVTVSS

SEQ ID NO: 8922 - protein, 100 aa, Homo sapiens
EVQLVESGGGLVQPGRSLRLSCTASGFSFGNYGMSWFRRTPGKGLEWVGYIRSKAQDGTVERAASVKDRFTISRDDSKSIAYLQMNSLKTEDTAVYYCSR

SEQ ID NO: 8923 - protein, 123 aa, Homo sapiens
EVQLVESGGGLVQPGRSLRLSCTASGFSFGNYGMSWFRRTPGKGLEWVGYIRSKAQDGTVERAASVKDRFTISRDDSKSIAYLQMNSLKTEDTAVYYCSRVDVNWNHDAFDIWGQGTMVTVSS

SEQ ID NO: 8924 - protein, 98 aa, Homo sapiens
EVQLVESGGGLVQPGRSLRLSCTASGFTFDDYAMQWVRQAPGKGLEWVSGISWDSGAIGYVASVKGRFTISRDNAKNSLYLQMTSLRPEDTALYYCAR

SEQ ID NO: 8925 - protein, 120 aa, Homo sapiens
EVQLVESGGGLVQPGRSLRLSCTASGFTFDDYAMQWVRQAPGKGLEWVSGISWDSGAIGYVASVKGRFTISRDNAKNSLYLQMTSLRPEDTALYYCARAPYGSGSYINHWGPGTLVTVSS

SEQ ID NO: 8926 - protein, 100 aa, Homo sapiens
EVQLVESGGGLVQPGRSLRLSCTASGFTFGDYAMSWFRQAPGKGLEWVGFIRSKAYGGTTEYAASVKGRFTISRDDSKSIAYLQMNSLKTEDTAVYYCTR

SEQ ID NO: 8927 - protein, 128 aa, Homo sapiens
EVQLVESGGGLVQPGRSLRLSCTASGFTFGDYAMSWFRQAPGKGLEWVGFIRSKAYGGTTEYAASVKGRFTISRDDSKSIAYLQMNSLKTEDTAVYYCTRDDRRYFDWLLPNWYFDLWGRGTLVTVSS

SEQ ID NO: 8928 - protein, 120 aa, Homo sapiens
EVQLVESGGGLVQPGRSLRLSCTASGFTFGDYAMSWFRQAPGKGLEWVGFIRSKAYGGTTEYAASVKGRFTISRDDSKSIAYLQMNSLKTEDTAVYYCTRVEQSSGPDYWGQGTLVTVSS

SEQ ID NO: 8929 - protein, 99 aa, Homo sapiens
EVQLVESGGGLVQPGRSLRLSCTASGFTFGDYAMSWVRQAPGKGLEWVGFIRSKAYGGTTEYAASVKGRFTISRDDSKSIAYLQMNSLKTEDTAVYYCT

SEQ ID NO: 8930 - protein, 131 aa, Homo sapiens
EVQLVESGGGLVQPGRSLRLSCTASGFTFGDYAMSWVRQAPGKGLEWVGFIRSKAYGGTTEYAASVKGRFTISRDDSKSIAYLQMNSLKTEDTAVYYCTSLGYCSGGSCSQYYYYYGMDVWGQGTTVTVSS

SEQ ID NO: 8931 - protein, 126 aa, Homo sapiens
EVQLVESGGGLVQPGRSLRLSCTASGFTFGDYAMSWVRQAPGKGLEWVGFIRSKAYGGTTEYAASVKGRFTISRDDSKSIAYLQMNSLKTEDTAVYYCTVVVVVAATPSAPYFDYWGQGTLVTVSS

SEQ ID NO: 8932 - protein, 99 aa, Homo sapiens
EVQLVESGGGLVQPGRSLRLSCVASGFTFHDYAIHWVRQAPGKGLEWVSGISWNSIGIGYADSVKGRFTISRDNAKNSLYLQMNSLRPEDTALYYCAKD

SEQ ID NO: 8933 - protein, 120 aa, Homo sapiens
EVQLVESGGGLVQPGRSLRLSCVASGFTFHDYAIHWVRQAPGKGLEWVSGISWNSIGIGYADSVKGRFTISRDNAKNSLYLQMNSLRPEDTALYYCAKDMSFEYYAMDVWGQGTTVTVSS

SEQ ID NO: 8934 - protein, 99 aa, Homo sapiens
EVQLVESGGGLVQPGRSLRLSCVGSGFRFDDYGMHWVRQAPGKGLEWVSGIGWNSGSIGYADSVKGRFIISRDNAKNSLYLQMNSLRAEDTALYYCAKD

SEQ ID NO: 8935 - protein, 124 aa, Homo sapiens
EVQLVESGGGLVQPGRSLRLSCVGSGFRFDDYGMHWVRQAPGKGLEWVSGIGWNSGSIGYADSVKGRFIISRDNAKNSLYLQMNSLRAEDTALYYCAKDIWAAGGGYFYYMDVWGKGTTVTVSS

SEQ ID NO: 8936 - protein, 97 aa, Homo sapiens
EVQLVESGGGLVQPGRSVRLSCAASGFTFDDYAMQWVRQAPGKGLEWVSGISWDSGSIGYADSVKGRFTISRDNAKNTLYLQMNTLRPEDTAFYYCG

SEQ ID NO: 8937 - protein, 119 aa, Homo sapiens
EVQLVESGGGLVQPGRSVRLSCAASGFTFDDYAMQWVRQAPGKGLEWVSGISWDSGSIGYADSVKGRFTISRDNAKNTLYLQMNTLRPEDTAFYYCGKSYGAGSYLMICGQGTLVTVSS

SEQ ID NO: 8938 - protein, 98 aa, Homo sapiens
EVQLVESGGGLVQSGGSLRLSCAASGFTFSIYNMHWVRQAPGKGLEWVSYISSTTITRYYADSVKGRFTISRDNAKNSLYLQMNSLRVEDTAVYYCAR

SEQ ID NO: 8939 - protein, 123 aa, Homo sapiens
EVQLVESGGGLVQSGGSLRLSCAASGFTFSIYNMHWVRQAPGKGLEWVSYISSTTITRYYADSVKGRFTISRDNAKNSLYLQMNSLRVEDTAVYYCARGTPQGRQWLVNFDYWGQGTLVTVSS

SEQ ID NO: 8940 - protein, 98 aa, Homo sapiens
EVQLVESGGGLVQSGGSLRLSCSASGFTFSSYWMSWVRQAPGKGLEWVADINEDGSTKYYVDSVEGRFTISRDNGQTSLYLQMNGLRDEDTGVYFCAR

SEQ ID NO: 8941 - protein, 123 aa, Homo sapiens
EVQLVESGGGLVQSGGSLRLSCSASGFTFSSYWMSWVRQAPGKGLEWVADINEDGSTKYYVDSVEGRFTISRDNGQTSLYLQMNGLRDEDTGVYFCARDPPSTSSLDTWFDPWGQGTLVTVSS

SEQ ID NO: 8942 - protein, 98 aa, Homo sapiens
EVQLVESGGGLVRPGESLRLSCAASGFTFRNYWMTWVRQAPGTGLEWVANLKPDGSDKYYVDSVKGRFTISRDNAKNSLYLQMTSLRAEDTAVYYCAR

SEQ ID NO: 8943 - protein, 126 aa, Homo sapiens
EVQLVESGGGLVRPGESLRLSCAASGFTFRNYWMTWVRQAPGTGLEWVANLKPDGSDKYYVDSVKGRFTISRDNAKNSLYLQMTSLRAEDTAVYYCARGTKMDYDTYGYYYFFDYWGQGILVTVSS

SEQ ID NO: 8944 - protein, 98 aa, Homo sapiens
EVQLVESGGGLVRPGGSLRLSCAASGFTVGTFGLTWVRQAPGKGLEWVSGFSGNGNSAYYADSVKGRFTISRDTSKNTLYLQMNSLRVDDSAVYYCAK

SEQ ID NO: 8945 - protein, 123 aa, Homo sapiens
EVQLVESGGGLVRPGGSLRLSCAASGFTVGTFGLTWVRQAPGKGLEWVSGFSGNGNSAYYADSVKGRFTISRDTSKNTLYLQMNSLRVDDSAVYYCAKDRQRTIPGAGSFDSWGQGTLVIVSS

SEQ ID NO: 8946 - protein, 98 aa, Homo sapiens
EVQLVESGGGLVRPGGTLRLSCAASGFTFTTYGLHWVRQAPGKGLEWVSFISGSGISTYYADSVKGRFTISRDNSKNTVYLHMNTLRAEDSAIYYCAR

SEQ ID NO: 8947 - protein, 123 aa, Homo sapiens
EVQLVESGGGLVRPGGTLRLSCAASGFTFTTYGLHWVRQAPGKGLEWVSFISGSGISTYYADSVKGRFTISRDNSKNTVYLHMNTLRAEDSAIYYCARDFGLRVVDQGAFDIWGRGTMVTVSS

SEQ ID NO: 8948 - protein, 96 aa, Homo sapiens
EVQLVESGGGSVQPGGSLRLSCAASGFRFSSYSMNWVRQAPGMGLEWLSYANNKDIFYADSVKGRFTVSRDNAKNSLYLQMNSLRAEDTAIYYCAR

SEQ ID NO: 8949 - protein, 118 aa, Homo sapiens
EVQLVESGGGSVQPGGSLRLSCAASGFRFSSYSMNWVRQAPGMGLEWLSYANNKDIFYADSVKGRFTVSRDNAKNSLYLQMNSLRAEDTAIYYCARGGTGDGDYFDYWGQGTLVTVSS

SEQ ID NO: 8950 - protein, 97 aa, Homo sapiens
EVQLVESGGGSVQPGGSLTLSCVASGSTLRDYWMAWVRQAPGKGLEWVANIKGDGSKKYYVDSVKGRFTISRDNAKNSLYLQMNSLRVEDTAVYHCA

SEQ ID NO: 8951 - protein, 117 aa, Homo sapiens
EVQLVESGGGSVQPGGSLTLSCVASGSTLRDYWMAWVRQAPGKGLEWVANIKGDGSKKYYVDSVKGRFTISRDNAKNSLYLQMNSLRVEDTAVYHCANLWEGIATFWGQGTLVTVSS

SEQ ID NO: 8952 - protein, 98 aa, Homo sapiens
EVQLVESGGGVAQPGGSLRLSCAASGFTFSSYWMHWVRQAPGKGLVWVSRINGDGSSTSYADSVKGRFTISRDNAKNTLYMQMKSLRAEDTAVYYCAR

SEQ ID NO: 8953 - protein, 124 aa, Homo sapiens
EVQLVESGGGVAQPGGSLRLSCAASGFTFSSYWMHWVRQAPGKGLVWVSRINGDGSSTSYADSVKGRFTISRDNAKNTLYMQMKSLRAEDTAVYYCARDMGDGTIPTYWYFDLWGRGTLVTVSS

SEQ ID NO: 8954 - protein, 98 aa, Homo sapiens
EVQLVESGGGVERPGGSLRLSCAASGFTFDDYGMSWVRQAPGKGLEWVSGINWNGGSTYYADSVKGRFTISRDNAKNSLYLQMNSLRAEDTALYYCAT

SEQ ID NO: 8955 - protein, 125 aa, Homo sapiens
EVQLVESGGGVERPGGSLRLSCAASGFTFDDYGMSWVRQAPGKGLEWVSGINWNGGSTYYADSVKGRFTISRDNAKNSLYLQMNSLRAEDTALYYCATEAVCGGDCPPGVWFDPWGQGTLVTVSS

SEQ ID NO: 8956 - protein, 99 aa, Homo sapiens
EVQLVESGGGVIQPGRSLRLSCAASGFSFDDYAMQWVRQAPGKGLEWVSGISWDSGSIGYADSVKGRFTISRDNAKKSLYLQMRSLRTEDTALYYCVKA

SEQ ID NO: 8957 - protein, 119 aa, Homo sapiens
EVQLVESGGGVIQPGRSLRLSCAASGFSFDDYAMQWVRQAPGKGLEWVSGISWDSGSIGYADSVKGRFTISRDNAKKSLYLQMRSLRTEDTALYYCVKANGAGSYSVSWGQGTPVTVSA

SEQ ID NO: 8958 - protein, 98 aa, Homo sapiens
EVQLVESGGGVVQPGGSLRLSCGASGFTFGKSRMSWVRQAPGKGPEWVANIKEDGSETYYLDSVKGRFTISRDNADNSLYLQMNSLRAEDTAVYYCAR

SEQ ID NO: 8959 - protein, 119 aa, Homo sapiens
EVQLVESGGGVVQPGGSLRLSCGASGFTFGKSRMSWVRQAPGKGPEWVANIKEDGSETYYLDSVKGRFTISRDNADNSLYLQMNSLRAEDTAVYYCARGVSSVVANDYWGQGTLVSVSS

SEQ ID NO: 8960 - protein, 98 aa, Homo sapiens
EVQLVESGGGVVQPGGSLRLSCGGSGFTFSNYWMHWVRQAPGKGLEWVASVKQDGREETYADSMKGRFTISRDNAKKSLYLQLNSLRPEDTAVYYCAR

SEQ ID NO: 8961 - protein, 121 aa, Homo sapiens
EVQLVESGGGVVQPGGSLRLSCGGSGFTFSNYWMHWVRQAPGKGLEWVASVKQDGREETYADSMKGRFTISRDNAKKSLYLQLNSLRPEDTAVYYCARGLSTSAWSPLGFWGQGTLVTVSS

SEQ ID NO: 8962 - protein, 98 aa, Homo sapiens
EVQLVESGGGVVRPGGSLRLSCAASGFIFDDYGMSWVRQAPGKGLEWVSGINWNGNNIGYVDSVRGRFTISRDTATNSVYLQMNSLRAEDTAFYYCAR

SEQ ID NO: 8963 - protein, 121 aa, Homo sapiens
EVQLVESGGGVVRPGGSLRLSCAASGFIFDDYGMSWVRQAPGKGLEWVSGINWNGNNIGYVDSVRGRFTISRDTATNSVYLQMNSLRAEDTAFYYCARDPSGWYINYLDFWGQGTLVTVSS

SEQ ID NO: 8964 - protein, 98 aa, Homo sapiens
EVQLVESGGGVVRPGGSLRLSCAASGFTFDDYDMNWVRQAPGKGLEWVSGINWNDDNTDYSDSVKGRFTISRDNPKNSLYLQMNSLRAEDTALYYCAR

SEQ ID NO: 8965 - protein, 122 aa, Homo sapiens
EVQLVESGGGVVRPGGSLRLSCAASGFTFDDYDMNWVRQAPGKGLEWVSGINWNDDNTDYSDSVKGRFTISRDNPKNSLYLQMNSLRAEDTALYYCARVWETEAYRRPFDYWGQGTLVTVSS

SEQ ID NO: 8966 - protein, 98 aa, Homo sapiens
EVQLVESGGGVVRPGGSLRLSCAASGFTFDDYGMSWVRQAPGKGLEWVSGINWNGGSTGYADSVKGRFTISRDNAKNSLYLQMNSLRAEDTALYYCAR

SEQ ID NO: 8967 - protein, 121 aa, Homo sapiens
EVQLVESGGGVVRPGGSLRLSCAASGFTFDDYGMSWVRQAPGKGLEWVSGINWNGGSTGYADSVKGRFTISRDNAKNSLYLQMNSLRAEDTALYYCARAWWFGELFPFGYWGQGTLVTVSS

SEQ ID NO: 8968 - protein, 127 aa, Homo sapiens
EVQLVESGGGVVRPGGSLRLSCAASGFTFDDYGMSWVRQAPGKGLEWVSGINWNGGSTGYADSVKGRFTISRDNAKNSLYLQMNSLRAEDTALYYCARDPPHNRITMVRGPKKYDYWGQGTLVTVSS

SEQ ID NO: 8969 - protein, 97 aa, Homo sapiens
EVQLVESGGGVVRPGGSLRLSCAASGFTFGDYGMSWVRQVPGKGLEWVCGINRDSTSRSYADSAKGRFTISRDYAKNSLYLQMNSLRAEDTALYYCG

SEQ ID NO: 8970 - protein, 120 aa, Homo sapiens
EVQLVESGGGVVRPGGSLRLSCAASGFTFGDYGMSWVRQVPGKGLEWVCGINRDSTSRSYADSAKGRFTISRDYAKNSLYLQMNSLRAEDTALYYCGRVLHAAHTAWDYWGQGTLVTVSS

SEQ ID NO: 8971 - protein, 97 aa, Homo sapiens
EVQLVESGGGVVRPGGSLRLSCAVSGFSFGDHAMNWVRQSPGKGLEWVANINYNGGSTSYADSVKGRFTISRDNAKNSLHLHMNRVRVEDTAFYYCV

SEQ ID NO: 8972 - protein, 130 aa, Homo sapiens
EVQLVESGGGVVRPGGSLRLSCAVSGFSFGDHAMNWVRQSPGKGLEWVANINYNGGSTSYADSVKGRFTISRDNAKNSLHLHMNRVRVEDTAFYYCVRGERRLMFADFLGEYPKDGFDVWGQGTVVTVSS

SEQ ID NO: 8973 - protein, 98 aa, Homo sapiens
EVQLVESGGGVVRPGGSLRLSCVASGFTFDDYGMTWVRQVPGKGLEWVSGINWNGGSTGYTDSVKGRFTISRDNARNSLYLQMNTLRADDTALYYCAR

SEQ ID NO: 8974 - protein, 124 aa, Homo sapiens
EVQLVESGGGVVRPGGSLRLSCVASGFTFDDYGMTWVRQVPGKGLEWVSGINWNGGSTGYTDSVKGRFTISRDNARNSLYLQMNTLRADDTALYYCARGGLGSYVRYYYYMDVWGKGTTVTVSS

SEQ ID NO: 8975 - protein, 98 aa, Homo sapiens
EVQLVESGGGVVRPGGSLRVSCAASGFTFDDYGMSWVRQAPGKGLEWVSGINWNGGSTGYADSVKGRFTISRDNAKNSLYLQMDSLRAEDTALYYCGR

SEQ ID NO: 8976 - protein, 124 aa, Homo sapiens
EVQLVESGGGVVRPGGSLRVSCAASGFTFDDYGMSWVRQAPGKGLEWVSGINWNGGSTGYADSVKGRFTISRDNAKNSLYLQMDSLRAEDTALYYCGRGEPPCGGDCHDAFDIWGQGTMVTVSS

SEQ ID NO: 8977 - protein, 98 aa, Homo sapiens
EVQLVESGGHLVQPGGSLRLSCEGSGFTFSSYSINWVRQAPGKGLEWLSYIGDTGRTSYYGDSVRGRFTISRDNAKNSVYLQMNSLRAEDTAVYYCAR

SEQ ID NO: 8978 - protein, 124 aa, Homo sapiens
EVQLVESGGHLVQPGGSLRLSCEGSGFTFSSYSINWVRQAPGKGLEWLSYIGDTGRTSYYGDSVRGRFTISRDNAKNSVYLQMNSLRAEDTAVYYCARFAYCRSTNCPEAFDYWGQGTLVTVSS

SEQ ID NO: 8979 - protein, 98 aa, Homo sapiens
EVQLVESGGHLVQPGGTLRLSCAASGFTFSRYGMSWVRQAPGKGLEWVSGFSGGGTSTYYTDSVKGRFTISRDNFKNTLYLQMNSLRAEDTAIYYCAK

SEQ ID NO: 8980 - protein, 123 aa, Homo sapiens
EVQLVESGGHLVQPGGTLRLSCAASGFTFSRYGMSWVRQAPGKGLEWVSGFSGGGTSTYYTDSVKGRFTISRDNFKNTLYLQMNSLRAEDTAIYYCAKDGDYRIPLAGSFDSWGQGTLVTVSS

SEQ ID NO: 8981 - protein, 98 aa, Homo sapiens
EVQLVESGGHSVQPGGSLRLSCEASGFTFNLYSMIWVRQAPGKGLEWLSYIGDTGRKIYYADSVEGRFTVSRDNARNLVYLQMNSLRADDTAVYYCAR

SEQ ID NO: 8982 - protein, 124 aa, Homo sapiens
EVQLVESGGHSVQPGGSLRLSCEASGFTFNLYSMIWVRQAPGKGLEWLSYIGDTGRKIYYADSVEGRFTVSRDNARNLVYLQMNSLRADDTAVYYCARFAFCRSTNCPESFDYWGQGTLVTVSS

SEQ ID NO: 8983 - protein, 98 aa, Homo sapiens
EVQLVESGGHSVQPGGSLRLSCEASGFTFSSYSMIWVRQAPGKGLEWLSYIGDTGRTSYYADSVQGRFTVSRDNAKNLVYLQMNSLRAEDTAVYYCAR

SEQ ID NO: 8984 - protein, 124 aa, Homo sapiens
EVQLVESGGHSVQPGGSLRLSCEASGFTFSSYSMIWVRQAPGKGLEWLSYIGDTGRTSYYADSVQGRFTVSRDNAKNLVYLQMNSLRAEDTAVYYCARFAYCRSTNCPESFDYWGQGTQVTVSS

SEQ ID NO: 8985 - protein, 97 aa, Homo sapiens
EVQLVESGGHSVYPGGALSLSCATSGFAFGNYGMNWVRQAPGKGLEWVSAINSNGRNTYYAASVKGRFTISRDNSNKIVYLEMNSLRAEDTAIYYCA

SEQ ID NO: 8986 - protein, 120 aa, Homo sapiens
EVQLVESGGHSVYPGGALSLSCATSGFAFGNYGMNWVRQAPGKGLEWVSAINSNGRNTYYAASVKGRFTISRDNSNKIVYLEMNSLRAEDTAIYYCAAYSYSESYPFDYWGQGVLVTVSS

SEQ ID NO: 8987 - protein, 98 aa, Homo sapiens
EVQLVESGGLLVQPGGSLRLSCEASGFTFSDYSMIWVRQAPGKGLEWLSYIGDTGRKTYYADSVKGRFTTSRDNAKNSVYLQMNSLRVEDTAVYYCAR

SEQ ID NO: 8988 - protein, 124 aa, Homo sapiens
EVQLVESGGLLVQPGGSLRLSCEASGFTFSDYSMIWVRQAPGKGLEWLSYIGDTGRKTYYADSVKGRFTTSRDNAKNSVYLQMNSLRVEDTAVYYCARFAFCRSYDCPESFDYWGQGTRVTVSS

SEQ ID NO: 8989 - protein, 99 aa, Homo sapiens
EVQLVESGGNLIQPGRSLRLSCAASGFRFEEFAIHWVRQPPGKGLEWVSGISWNSRTIGYADSVKGRFTISRDNAKNSVYLQMNSLRVEDTALYYCVKD

SEQ ID NO: 8990 - protein, 122 aa, Homo sapiens
EVQLVESGGNLIQPGRSLRLSCAASGFRFEEFAIHWVRQPPGKGLEWVSGISWNSRTIGYADSVKGRFTISRDNAKNSVYLQMNSLRVEDTALYYCVKDGRQWVQYNWFDPWGQGTLVTVSS

SEQ ID NO: 8991 - protein, 98 aa, Homo sapiens
EVQLVESGGNLVQPGGSLRLSCAASGFTFSTYWMTWVRQAPGKGLEWVANIKPDGSDKNYLGSVRGRFTISRDNVKNSSFLQLNSLRAEDTAVYYCAR

SEQ ID NO: 8992 - protein, 123 aa, Homo sapiens
EVQLVESGGNLVQPGGSLRLSCAASGFTFSTYWMTWVRQAPGKGLEWVANIKPDGSDKNYLGSVRGRFTISRDNVKNSSFLQLNSLRAEDTAVYYCARVRLREASAYNPIDFWGQGTLVIVSS

SEQ ID NO: 8993 - protein, 96 aa, Homo sapiens
EVQLVESGGNLVQPGGSLRLSCAASGFTVSSNYMSWVRQAPGKGLEWVSVIYSGGSTYYADSVKGRFTISRDNSKNTLFLQMNSLRAEDTAMYYCA

SEQ ID NO: 8994 - protein, 120 aa, Homo sapiens
EVQLVESGGNLVQPGGSLRLSCAASGFTVSSNYMSWVRQAPGKGLEWVSVIYSGGSTYYADSVKGRFTISRDNSKNTLFLQMNSLRAEDTAMYYCARRKWGIVDWYFDLWGRGTLVTVSS

SEQ ID NO: 8995 - protein, 98 aa, Homo sapiens
EVQLVESGGNLVRPGGSLRLSCAGSGFTFSKYGMSWVRQAPGKGLEWVSSITFTGGSTYYADSVKGRFTISRDQSKNTLFLQMNSLRAEDTAVYYCAK

SEQ ID NO: 8996 - protein, 123 aa, Homo sapiens
EVQLVESGGNLVRPGGSLRLSCAGSGFTFSKYGMSWVRQAPGKGLEWVSSITFTGGSTYYADSVKGRFTISRDQSKNTLFLQMNSLRAEDTAVYYCAKDRALTIPDSGTFDTWGQGTLVTVSS

SEQ ID NO: 8997 - protein, 98 aa, Homo sapiens
EVQLVESGGRLVKPGGSLRLSCAASGFTFSLYSMNWVRQAPGKGLEWVASISGDTNYIYYADSVKGRFTISRDNAKNSVSLQMNSLTAEDTAVYYCAR

SEQ ID NO: 8998 - protein, 123 aa, Homo sapiens
EVQLVESGGRLVKPGGSLRLSCAASGFTFSLYSMNWVRQAPGKGLEWVASISGDTNYIYYADSVKGRFTISRDNAKNSVSLQMNSLTAEDTAVYYCARPLITSIVRGGGCPYWGQGTLVTVSS

SEQ ID NO: 8999 - protein, 98 aa, Homo sapiens
EVQLVESGGRLVQPGGSLRLSCEASGFSFSDYSMNWVRQAPGKGLEWLSYIGDTGRRTYYADSVKGRFISSRDNAKNSVYLQMNSLRAGDTAVYYCAR

SEQ ID NO: 9000 - protein, 124 aa, Homo sapiens
EVQLVESGGRLVQPGGSLRLSCEASGFSFSDYSMNWVRQAPGKGLEWLSYIGDTGRRTYYADSVKGRFISSRDNAKNSVYLQMNSLRAGDTAVYYCARFAFCRSTNCPESFDYWGQGTLVTVSS

SEQ ID NO: 9001 - protein, 98 aa, Homo sapiens
EVQLVESGGSLIQPGRSLRLSCAASGFTFSSFGMNWVRQAPGKGLEWVSYISATSLSTYYTDSVKGRFTVSRDNARNSLYLQMNNLRVEDTAVYYCAT

SEQ ID NO: 9002 - protein, 123 aa, Homo sapiens
EVQLVESGGSLIQPGRSLRLSCAASGFTFSSFGMNWVRQAPGKGLEWVSYISATSLSTYYTDSVKGRFTVSRDNARNSLYLQMNNLRVEDTAVYYCATVGGVVGPTLGRSDYWGQGTLVSVSS

SEQ ID NO: 9003 - protein, 98 aa, Homo sapiens
EVQLVESGGSLVQPGRSLRLSCAASGFTFDDYAMHWVRQSPGKGLEWISGISWSSGAIGYADSVRGRFVISRDNAKSSLYLQMTSLRRDDTAFYYCAR

SEQ ID NO: 9004 - protein, 119 aa, Homo sapiens
EVQLVESGGSLVQPGRSLRLSCAASGFTFDDYAMHWVRQSPGKGLEWISGISWSSGAIGYADSVRGRFVISRDNAKSSLYLQMTSLRRDDTAFYYCARGGGAGSYSDHLGQGTLVTVSS

SEQ ID NO: 9005 - protein, 97 aa, Homo sapiens
EVQLVESGGSLVQSGGSLRLSCTASRFSFSNYLMTWVRQAPGKGLEWVANIKQDGDAKFYVDSVKGRFTVSRDNAKSSLYLQMNGLRAEDTAVYYCA

SEQ ID NO: 9006 - protein, 122 aa, Homo sapiens
EVQLVESGGSLVQSGGSLRLSCTASRFSFSNYLMTWVRQAPGKGLEWVANIKQDGDAKFYVDSVKGRFTVSRDNAKSSLYLQMNGLRAEDTAVYYCATSLGDNDNAGYLDYWGQGTPVTVSS

SEQ ID NO: 9007 - protein, 96 aa, Homo sapiens
EVQLVESGGVLVQPGGSLRLSCVASGFTFSSYWMHWVRQFPGKGLVWVSRIKTDGSSTSYADSVEGRFTISRDNAKNTLYLQMNSLRVEDTAVYFC

SEQ ID NO: 9008 - protein, 118 aa, Homo sapiens
EVQLVESGGVLVQPGGSLRLSCVASGFTFSSYWMHWVRQFPGKGLVWVSRIKTDGSSTSYADSVEGRFTISRDNAKNTLYLQMNSLRVEDTAVYFCGRGSRLGIPDSWGQGTLVTVSS

SEQ ID NO: 9009 - protein, 98 aa, Homo sapiens
EVQLVESGGVLVQPGRSLRLSCAASGFSFDENVMHWVRQAPGKGLEWVSGISWNSDKIGYADSVKGRFTISRDNAKNSLYLQMDSLRAADSALYYCAK

SEQ ID NO: 9010 - protein, 123 aa, Homo sapiens
EVQLVESGGVLVQPGRSLRLSCAASGFSFDENVMHWVRQAPGKGLEWVSGISWNSDKIGYADSVKGRFTISRDNAKNSLYLQMDSLRAADSALYYCAKGYCSSTHCYGYFDLWGRGTLVTVSS

SEQ ID NO: 9011 - protein, 98 aa, Homo sapiens
EVQLVESGGVVVQPGGSLRLSCAASGFTFDDYAIHWVRQAPGKGLEWVSLISWDGDSTYYADSVKGRFTISRDNSTNSLYLQMNSLRAEDTALYYCAK

SEQ ID NO: 9012 - protein, 121 aa, Homo sapiens
EVQLVESGGVVVQPGGSLRLSCAASGFTFDDYAIHWVRQAPGKGLEWVSLISWDGDSTYYADSVKGRFTISRDNSTNSLYLQMNSLRAEDTALYYCAKVLFSHYYYGMDVWGQGTTVTVSS

SEQ ID NO: 9013 - protein, 98 aa, Homo sapiens
EVQLVESGGVVVQPGGSLRLSCAASGFTFDDYTMHWVRQAPGKGLEWVSLISWDGGSTYYADSVKGRFTISRDNSKNSLYLQMNSLRTEDTALYYCAK

SEQ ID NO: 9014 - protein, 124 aa, Homo sapiens
EVQLVESGGVVVQPGGSLRLSCAASGFTFDDYTMHWVRQAPGKGLEWVSLISWDGGSTYYADSVKGRFTISRDNSKNSLYLQMNSLRTEDTALYYCAKGGSGSYYNVLGYFDYWGQGTLVTVSS

SEQ ID NO: 9015 - protein, 97 aa, Homo sapiens
EVQLVESGGVVVQPGGSLRLSCAASGFTFNDYAMHWVRQGPGRGLEWVSLINWDGSDTYYSDSVEGRFTISRDNDKSSLYLQMNSLRFEDTAVYYCA

SEQ ID NO: 9016 - protein, 124 aa, Homo sapiens
EVQLVESGGVVVQPGGSLRLSCAASGFTFNDYAMHWVRQGPGRGLEWVSLINWDGSDTYYSDSVEGRFTISRDNDKSSLYLQMNSLRFEDTAVYYCARGGYYFKPPEQIQADYWGRGTLVIVTS

SEQ ID NO: 9017 - protein, 97 aa, Homo sapiens
EVQLVETGGGLIQPGGSLRLSCAASGFTVRSNYMSWVRQAPGKGLEWVSIIYSGGSTDYADSVKGRFTISRDNSKNTLYLQMNSLRAEDTAVYYCAR

SEQ ID NO: 9018 - protein, 114 aa, Homo sapiens
EVQLVETGGGLIQPGGSLRLSCAASGFTVRSNYMSWVRQAPGKGLEWVSIIYSGGSTDYADSVKGRFTISRDNSKNTLYLQMNSLRAEDTAVYYCARGSAFDIWGQGTMVTVSS

SEQ ID NO: 9019 - protein, 97 aa, Homo sapiens
EVQLVETGGGLIQPGGSLRLSCAASGFTVSSNYMSWVRQAPGKGLEWVSVIYSGGSTYYADSVKGRFTISRDNSKNTLYLQMNSLRAEDTAVYYCAR

SEQ ID NO: 9020 - protein, 124 aa, Homo sapiens
EVQLVETGGGLIQPGGSLRLSCAASGFTVSSNYMSWVRQAPGKGLEWVSVIYSGGSTYYADSVKGRFTISRDNSKNTLYLQMNSLRAEDTAVYYCARDRSPGSLGYYYYGMDVWGQGTTVTVSS

SEQ ID NO: 9021 - protein, 98 aa, Homo sapiens
EVQLVETGGGLVQPGGSLRLSCAASGFTFSDYWMTWFRQAPGRGLEWVANIKGDGSEKYYVDSVKGRFTISRDNAENSVYLQMNSLRDEDTAVYYCAR

SEQ ID NO: 9022 - protein, 118 aa, Homo sapiens
EVQLVETGGGLVQPGGSLRLSCAASGFTFSDYWMTWFRQAPGRGLEWVANIKGDGSEKYYVDSVKGRFTISRDNAENSVYLQMNSLRDEDTAVYYCARDTLRILQGSWGQGTLVTVSS

SEQ ID NO: 9023 - protein, 97 aa, Homo sapiens
EVQLVGSGGGLVQPGGSLRVSCAASGFIFSNYEMNWVRQGPGKGLEWISYISTSGITKYYADSVKGRFTISRDNAKSSVYLQMNNLKVEDTGLYFCA

SEQ ID NO: 9024 - protein, 114 aa, Homo sapiens
EVQLVGSGGGLVQPGGSLRVSCAASGFIFSNYEMNWVRQGPGKGLEWISYISTSGITKYYADSVKGRFTISRDNAKSSVYLQMNNLKVEDTGLYFCARAGSDLWGQGMLVTVSS

SEQ ID NO: 9025 - protein, 96 aa, Homo sapiens
EVQLVQSEAEVKRPGTTLKISCRASGYTFTDHYMHWVRQAPGKGLEWMGLIDPEDGEREYAEKFQGRAAISADTSADTAYLELSSLRSEDTAVYYC

SEQ ID NO: 9026 - protein, 118 aa, Homo sapiens
EVQLVQSEAEVKRPGTTLKISCRASGYTFTDHYMHWVRQAPGKGLEWMGLIDPEDGEREYAEKFQGRAAISADTSADTAYLELSSLRSEDTAVYYCVAQLRYNWFDTWGRGTLITVSS

SEQ ID NO: 9027 - protein, 97 aa, Homo sapiens
EVQLVQSGAEAKKPGESLRISCKGSGYSFASYWISWVRRMPGKGLEWMGRIDPRDSYTSYSPSFQGHVTISVDKSINTAYLQWSSVKASDTAMYYCA

SEQ ID NO: 9028 - protein, 128 aa, Homo sapiens
EVQLVQSGAEAKKPGESLRISCKGSGYSFASYWISWVRRMPGKGLEWMGRIDPRDSYTSYSPSFQGHVTISVDKSINTAYLQWSSVKASDTAMYYCATNDPNTYYYDDSGANYGMDVWGQGTTVTVSS

SEQ ID NO: 9029 - protein, 96 aa, Homo sapiens
EVQLVQSGAEVEKPGATVKISCKVSGYTFTDYYIHWVRQAPGKGLEWMGLIDPEDAKTMYAKKFQGRFTITADTSTDTAYMELTSLRSEDTAMYYC

SEQ ID NO: 9030 - protein, 120 aa, Homo sapiens
EVQLVQSGAEVEKPGATVKISCKVSGYTFTDYYIHWVRQAPGKGLEWMGLIDPEDAKTMYAKKFQGRFTITADTSTDTAYMELTSLRSEDTAMYYCRSGGYAGLDVFDFWGRGTMVIVSS

SEQ ID NO: 9031 - protein, 98 aa, Homo sapiens
EVQLVQSGAEVKEPGESLKVSCQGSGYTFTSYWIGWVRQMPGKGLEWVGVIYPGDSDTRYTPSFQGQVTMSVDKAVSTAYLQWSSLKASDTAMYYCAR

SEQ ID NO: 9032 - protein, 121 aa, Homo sapiens
EVQLVQSGAEVKEPGESLKVSCQGSGYTFTSYWIGWVRQMPGKGLEWVGVIYPGDSDTRYTPSFQGQVTMSVDKAVSTAYLQWSSLKASDTAMYYCARHHHPRWWEVIDYWGQGTLVTVSS

SEQ ID NO: 9033 - protein, 98 aa, Homo sapiens
EVQLVQSGAEVKKPGATVRLSCKVSGYTFTNFYIHWIQQAPGKGLEWMGLIDPEDGKTMYAGKFQGRLTINADTSIDTAYMDLSSLTSEDTAVYFCAT

SEQ ID NO: 9034 - protein, 121 aa, Homo sapiens
EVQLVQSGAEVKKPGATVRLSCKVSGYTFTNFYIHWIQQAPGKGLEWMGLIDPEDGKTMYAGKFQGRLTINADTSIDTAYMDLSSLTSEDTAVYFCATMGYYNGTQRFDKWGQGTLVSVSS

SEQ ID NO: 9035 - protein, 102 aa, Homo sapiens
EVQLVQSGAEVKKPGDSLKISCQTSGYTFTDYWIGWVRQMPGKGPEWMGIVYPGDSKSDSKSTYNPSFQGQVTISADKSLTTAYLQWSSLRASDTAMYYCGR

SEQ ID NO: 9036 - protein, 130 aa, Homo sapiens
EVQLVQSGAEVKKPGDSLKISCQTSGYTFTDYWIGWVRQMPGKGPEWMGIVYPGDSKSDSKSTYNPSFQGQVTISADKSLTTAYLQWSSLRASDTAMYYCGRLSRPHRDSAGGYSPFDYWGQGTLLTVSS

SEQ ID NO: 9037 - protein, 98 aa, Homo sapiens
EVQLVQSGAEVKKPGDSLRISCKGSGYSFTNYWINWVRQMPGKGLEWMGRIDPSDSYTDYSPSFQGHVTISADKSITTAYLQWSSLKASDTAMYYCAR

SEQ ID NO: 9038 - protein, 121 aa, Homo sapiens
EVQLVQSGAEVKKPGDSLRISCKGSGYSFTNYWINWVRQMPGKGLEWMGRIDPSDSYTDYSPSFQGHVTISADKSITTAYLQWSSLKASDTAMYYCARHQGNPGLERFDPWGQGTLVTVSS

SEQ ID NO: 9039 - protein, 98 aa, Homo sapiens
EVQLVQSGAEVKKPGESLKISCKAFGYSFTSYWVGWVRQMPGKGLEFVTMIYPGDSDARYNPSFEGHVTISVDNSINTAYLQWSSLRASDTAMYYCAR

SEQ ID NO: 9040 - protein, 128 aa, Homo sapiens
EVQLVQSGAEVKKPGESLKISCKAFGYSFTSYWVGWVRQMPGKGLEFVTMIYPGDSDARYNPSFEGHVTISVDNSINTAYLQWSSLRASDTAMYYCARSLGYCSSTSCYGAEYFFDFWGQGTLVTVSS

SEQ ID NO: 9041 - protein, 98 aa, Homo sapiens
EVQLVQSGAEVKKPGESLKISCKASGYSFGSSWITWVRQMPGKGLEWMGIIYPGDSDTRYSPSFQGQVTFSADKSISTAYLQWSSLKASDTAIYYCAR

SEQ ID NO: 9042 - protein, 117 aa, Homo sapiens
EVQLVQSGAEVKKPGESLKISCKASGYSFGSSWITWVRQMPGKGLEWMGIIYPGDSDTRYSPSFQGQVTFSADKSISTAYLQWSSLKASDTAIYYCARRKDAYNDYWGQGTLVTVSS

SEQ ID NO: 9043 - protein, 98 aa, Homo sapiens
EVQLVQSGAEVKKPGESLKISCKGSGYIFTSDWIGWVRQMPGKGLEWMGIVFPGDSDTKYSPSFQGQVTISADKSITTAYLQWSSLKASDTAMYYCAR

SEQ ID NO: 9044 - protein, 117 aa, Homo sapiens
EVQLVQSGAEVKKPGESLKISCKGSGYIFTSDWIGWVRQMPGKGLEWMGIVFPGDSDTKYSPSFQGQVTISADKSITTAYLQWSSLKASDTAMYYCARLRGTAFDVWGQGTMVIVSS

SEQ ID NO: 9045 - protein, 97 aa, Homo sapiens
EVQLVQSGAEVKKPGESLKISCKGSGYNFANYWIGWVRQMPGKGLEWMGIIYPGDSDTKYSPSFQGQVTFSADRSISTAFLQWSSLKASDTAMYYCA

SEQ ID NO: 9046 - protein, 121 aa, Homo sapiens
EVQLVQSGAEVKKPGESLKISCKGSGYNFANYWIGWVRQMPGKGLEWMGIIYPGDSDTKYSPSFQGQVTFSADRSISTAFLQWSSLKASDTAMYYCAKRGGVEVAGAFDIWGQGTMVTVSS

SEQ ID NO: 9047 - protein, 97 aa, Homo sapiens
EVQLVQSGAEVKKPGESLKISCKGSGYNFANYWIGWVRQMPGKGLEWMGVIYPGDSDTKYSPSFQGQVTFSADRSISTAFLQWSSLKASDTATYYCA

SEQ ID NO: 9048 - protein, 121 aa, Homo sapiens
EVQLVQSGAEVKKPGESLKISCKGSGYNFANYWIGWVRQMPGKGLEWMGVIYPGDSDTKYSPSFQGQVTFSADRSISTAFLQWSSLKASDTATYYCAKRGGVDVAGAFDIWGQGTMITVSS

SEQ ID NO: 9049 - protein, 98 aa, Homo sapiens
EVQLVQSGAEVKKPGESLKISCKGSGYNFATYWIAWVRQMPGKGLEWMGNIYPGDSDARYSPSFQGQVTMSADRFISTAYLQWSSLKASDTAMYYCAR

SEQ ID NO: 9050 - protein, 118 aa, Homo sapiens
EVQLVQSGAEVKKPGESLKISCKGSGYNFATYWIAWVRQMPGKGLEWMGNIYPGDSDARYSPSFQGQVTMSADRFISTAYLQWSSLKASDTAMYYCARRSTDYNMDVWGQGTTVTVSS

SEQ ID NO: 9051 - protein, 98 aa, Homo sapiens
EVQLVQSGAEVKKPGESLKISCKGSGYNFTNYWIGWVRQMPGKGLEWMGIIYPGDSDTRYSPSFQGQVTISADKSISTAYLQWGSLKASDTAIYYCVR

SEQ ID NO: 9052 - protein, 126 aa, Homo sapiens
EVQLVQSGAEVKKPGESLKISCKGSGYNFTNYWIGWVRQMPGKGLEWMGIIYPGDSDTRYSPSFQGQVTISADKSISTAYLQWGSLKASDTAIYYCVRLDRYCTKTSCFGSWFDPWGQGTQVTVSS

SEQ ID NO: 9053 - protein, 98 aa, Homo sapiens
EVQLVQSGAEVKKPGESLKISCKGSGYSFASYWIAWVRQTPGKGLEWMGIIYPGDSDTKYSPSFQGQVTFSADKSLSTAFLQWSSLKDSDTAIYYCAR

SEQ ID NO: 9054 - protein, 118 aa, Homo sapiens
EVQLVQSGAEVKKPGESLKISCKGSGYSFASYWIAWVRQTPGKGLEWMGIIYPGDSDTKYSPSFQGQVTFSADKSLSTAFLQWSSLKDSDTAIYYCARRDADMGVAYWGQGTQVTVSS

SEQ ID NO: 9055 - protein, 98 aa, Homo sapiens
EVQLVQSGAEVKKPGESLKISCKGSGYSFNDYWIGWVRQMPGKGLEWMGSIYPGDSDTRYSPSFQGQVTISVDKSTSSAYLQWSSLKASDSAMYYCTR

SEQ ID NO: 9056 - protein, 128 aa, Homo sapiens
EVQLVQSGAEVKKPGESLKISCKGSGYSFNDYWIGWVRQMPGKGLEWMGSIYPGDSDTRYSPSFQGQVTISVDKSTSSAYLQWSSLKASDSAMYYCTRRISMIEDVVVDNQMGVFDMWGQGTMVTVSS

SEQ ID NO: 9057 - protein, 98 aa, Homo sapiens
EVQLVQSGAEVKKPGESLKISCKGSGYSFPNYWIGWVRQMPGKGLEWMGIIYPDDSDIRYSPSFQGQVTISADKSITTAYLQWNSLKASDTALYYCAR

SEQ ID NO: 9058 - protein, 127 aa, Homo sapiens
EVQLVQSGAEVKKPGESLKISCKGSGYSFPNYWIGWVRQMPGKGLEWMGIIYPDDSDIRYSPSFQGQVTISADKSITTAYLQWNSLKASDTALYYCARSTPYYDFWSGPYPQPFDYWGQGTLVTVSS

SEQ ID NO: 9059 - protein, 98 aa, Homo sapiens
EVQLVQSGAEVKKPGESLKISCKGSGYSFSSHWIAWVRQMPGKGLEWMGIIYPGDSDTKYSPSFQGQVTISADKSISTAYLQWSSLKASDTAMYYCAR

SEQ ID NO: 9060 - protein, 118 aa, Homo sapiens
EVQLVQSGAEVKKPGESLKISCKGSGYSFSSHWIAWVRQMPGKGLEWMGIIYPGDSDTKYSPSFQGQVTISADKSISTAYLQWSSLKASDTAMYYCARRDATYGVDVWGQGTTVTVSS

SEQ ID NO: 9061 - protein, 98 aa, Homo sapiens
EVQLVQSGAEVKKPGESLKISCKGSGYSFSSYWIAWVRQMPGKGLEWMGVIYPGDSETRYSPSFEGQVTLSADKSISTAYLQWSSLKASDTAMYYCAR

SEQ ID NO: 9062 - protein, 117 aa, Homo sapiens
EVQLVQSGAEVKKPGESLKISCKGSGYSFSSYWIAWVRQMPGKGLEWMGVIYPGDSETRYSPSFEGQVTLSADKSISTAYLQWSSLKASDTAMYYCARRTVDDMDVWGQGTTVIVSS

SEQ ID NO: 9063 - protein, 98 aa, Homo sapiens
EVQLVQSGAEVKKPGESLKISCKGSGYSFTAYWIAWVRQMPGKGLEWMGNIYPGDSDTKYSPSFQGQVTFSVDKSTNTAYLQWNSLKASDTAIYYCAR

SEQ ID NO: 9064 - protein, 118 aa, Homo sapiens
EVQLVQSGAEVKKPGESLKISCKGSGYSFTAYWIAWVRQMPGKGLEWMGNIYPGDSDTKYSPSFQGQVTFSVDKSTNTAYLQWNSLKASDTAIYYCARRHTDFNMDVWGNGTKVTVSS

SEQ ID NO: 9065 - protein, 98 aa, Homo sapiens
EVQLVQSGAEVKKPGESLKISCKGSGYSFTNNWIGWVRQMPGKGLEWMGIIYPGDSDTRYSQSFQGQVTISADKSISTAYLQWSSLKASDTAMYYCAR

SEQ ID NO: 9066 - protein, 125 aa, Homo sapiens
EVQLVQSGAEVKKPGESLKISCKGSGYSFTNNWIGWVRQMPGKGLEWMGIIYPGDSDTRYSQSFQGQVTISADKSISTAYLQWSSLKASDTAMYYCARLSHWLERGNLAGAFDIWGQGTKVTVSS

SEQ ID NO: 9067 - protein, 98 aa, Homo sapiens
EVQLVQSGAEVKKPGESLKISCKGSGYSFTSYWIAWVRQKPGKGLEWMGIIYPGDSDTRYSPSFQGQATMSADKSISTAYLQWSTLKASDTAMYYCAR

SEQ ID NO: 9068 - protein, 118 aa, Homo sapiens
EVQLVQSGAEVKKPGESLKISCKGSGYSFTSYWIAWVRQKPGKGLEWMGIIYPGDSDTRYSPSFQGQATMSADKSISTAYLQWSTLKASDTAMYYCARRETERGLDVWGQGTTVTVSS

SEQ ID NO: 9069 - protein, 97 aa, Homo sapiens
EVQLVQSGAEVKKPGESLKISCKGSGYSFTSYWIAWVRQVPGKGLEWMGIIYPGDSDTKYSPSFEGQVTISADRSITTAYLQWSSLKASDTATYYCA

SEQ ID NO: 9070 - protein, 121 aa, Homo sapiens
EVQLVQSGAEVKKPGESLKISCKGSGYSFTSYWIAWVRQVPGKGLEWMGIIYPGDSDTKYSPSFEGQVTISADRSITTAYLQWSSLKASDTATYYCAKRGGAAVAGAFDVWGQGTMVTVSS

SEQ ID NO: 9071 - protein, 98 aa, Homo sapiens
EVQLVQSGAEVKKPGESLKISCKGSGYSFTSYWIGWVRQMPGKGLECMGIIYPGDSDTRYSPSFQGQVTISADKSISTAYLQWSSLKASDTAMYYCAR

SEQ ID NO: 9072 - protein, 123 aa, Homo sapiens
EVQLVQSGAEVKKPGESLKISCKGSGYSFTSYWIGWVRQMPGKGLECMGIIYPGDSDTRYSPSFQGQVTISADKSISTAYLQWSSLKASDTAMYYCARLSYGDFVLENWFDPWGQGTLVTVSS

SEQ ID NO: 9073 - protein, 97 aa, Homo sapiens
EVQLVQSGAEVKKPGESLKISCKGSGYSFTSYWIGWVRQMPGKGLEWMGIIYPGDSDTRYSPSFQGQVTISADKSISTAYLQWSSLKASDTAMYYCA

SEQ ID NO: 9074 - protein, 98 aa, Homo sapiens
EVQLVQSGAEVKKPGESLKISCKGSGYSFTSYWIGWVRQMPGKGLEWMGIIYPGDSDTRYSPSFQGQVTISADKSISTAYLQWSSLKASDTAMYYCAR

SEQ ID NO: 9075 - protein, 125 aa, Homo sapiens
EVQLVQSGAEVKKPGESLKISCKGSGYSFTSYWIGWVRQMPGKGLEWMGIIYPGDSDTRYSPSFQGQVTISADKSISTAYLQWSSLKASDTAMYYCARDMNGDGYNTLHNAFDIWGQGTMVTVSS

SEQ ID NO: 9076 - protein, 123 aa, Homo sapiens
EVQLVQSGAEVKKPGESLKISCKGSGYSFTSYWIGWVRQMPGKGLEWMGIIYPGDSDTRYSPSFQGQVTISADKSISTAYLQWSSLKASDTAMYYCARERPGSSWYNDAFDIWGQGTMVTVSS

SEQ ID NO: 9077 - protein, 117 aa, Homo sapiens
EVQLVQSGAEVKKPGESLKISCKGSGYSFTSYWIGWVRQMPGKGLEWMGIIYPGDSDTRYSPSFQGQVTISADKSISTAYLQWSSLKASDTAMYYCARHESAMVDYWGQGTLVTVSS

SEQ ID NO: 9078 - protein, 126 aa, Homo sapiens
EVQLVQSGAEVKKPGESLKISCKGSGYSFTSYWIGWVRQMPGKGLEWMGIIYPGDSDTRYSPSFQGQVTISADKSISTAYLQWSSLKASDTAMYYCARHLAAAGTGGYYYYYMDVWGKGTTVTVSS

SEQ ID NO: 9079 - protein, 124 aa, Homo sapiens
EVQLVQSGAEVKKPGESLKISCKGSGYSFTSYWIGWVRQMPGKGLEWMGIIYPGDSDTRYSPSFQGQVTISADKSISTAYLQWSSLKASDTAMYYCARLGRVVVAAHPTPPVYWGQGTLVTVSS

SEQ ID NO: 9080 - protein, 119 aa, Homo sapiens
EVQLVQSGAEVKKPGESLKISCKGSGYSFTSYWIGWVRQMPGKGLEWMGIIYPGDSDTRYSPSFQGQVTISADKSISTAYLQWSSLKASDTAMYYCARPGEWGGGFDYWGQGTLVTVSS

SEQ ID NO: 9081 - protein, 119 aa, Homo sapiens
EVQLVQSGAEVKKPGESLKISCKGSGYSFTSYWIGWVRQMPGKGLEWMGIIYPGDSDTRYSPSFQGQVTISADKSISTAYLQWSSLKASDTAMYYCARRGGSGSGPDYWGQGTLVTVSS

SEQ ID NO: 9082 - protein, 126 aa, Homo sapiens
EVQLVQSGAEVKKPGESLKISCKGSGYSFTSYWIGWVRQMPGKGLEWMGIIYPGDSDTRYSPSFQGQVTISADKSISTAYLQWSSLKASDTAMYYCARSRRSGAAGTGGVRAFDIWGQGTMVTVSS

SEQ ID NO: 9083 - protein, 127 aa, Homo sapiens
EVQLVQSGAEVKKPGESLKISCKGSGYSFTSYWIGWVRQMPGKGLEWMGIIYPGDSDTRYSPSFQGQVTISADKSISTAYLQWSSLKASDTAMYYCARSSWGLGFEWELLPGYFDYWGQGTLVTVSS

SEQ ID NO: 9084 - protein, 119 aa, Homo sapiens
EVQLVQSGAEVKKPGESLKISCKGSGYSFTSYWIGWVRQMPGKGLEWMGIIYPGDSDTRYSPSFQGQVTISADKSISTAYLQWSSLKASDTAMYYCARSTGDQEPFDYWGQGTLVTVSS

SEQ ID NO: 9085 - protein, 118 aa, Homo sapiens
EVQLVQSGAEVKKPGESLKISCKGSGYSFTSYWIGWVRQMPGKGLEWMGIIYPGDSDTRYSPSFQGQVTISADKSISTAYLQWSSLKASDTAMYYCARVPTVAGIDYWGQGTLVTVSS

SEQ ID NO: 9086 - protein, 128 aa, Homo sapiens
EVQLVQSGAEVKKPGESLKISCKGSGYSFTSYWIGWVRQMPGKGLEWMGIIYPGDSDTRYSPSFQGQVTISADKSISTAYLQWSSLKASDTAMYYCARVSPAYYDILTGYQTGYMDVWGKGTTVTVSS

SEQ ID NO: 9087 - protein, 122 aa, Homo sapiens
EVQLVQSGAEVKKPGESLKISCKGSGYSFTSYWIGWVRQMPGKGLEWMGIIYPGDSDTRYSPSFQGQVTISADKSISTAYLQWSSLKASDTAMYYCASEVAVAGSIVAFDIWGQGTMVTVSS

SEQ ID NO: 9088 - protein, 125 aa, Homo sapiens
EVQLVQSGAEVKKPGESLKISCKGSGYSFTSYWIGWVRQMPGKGLEWMGIIYPGDSDTRYSPSFQGQVTISADKSISTAYLQWSSLKASDTAMYYCASTVTMVRGGEPYYAFDIWGQGTMVTVSS

SEQ ID NO: 9089 - protein, 124 aa, Homo sapiens
EVQLVQSGAEVKKPGESLKISCKGSGYSFTSYWIGWVRQMPGKGLEWMGIIYPGDSDTRYSPSFQGQVTISADKSISTAYLQWSSLKASDTAMYYCASTYYYGSGSYSYPFDYWGQGTLVTVSS

SEQ ID NO: 9090 - protein, 98 aa, Homo sapiens
EVQLVQSGAEVKKPGESLKISCKGSGYSFTTHWIGWVRQMPGKGLEWMGIIYPDDSDTRYSPSFQGQVTFSVDKAINTAYLQWSRLKASDTAMYYCAR

SEQ ID NO: 9091 - protein, 119 aa, Homo sapiens
EVQLVQSGAEVKKPGESLKISCKGSGYSFTTHWIGWVRQMPGKGLEWMGIIYPDDSDTRYSPSFQGQVTFSVDKAINTAYLQWSRLKASDTAMYYCARHPGSGTANDYWGQGTLVTVFS

SEQ ID NO: 9092 - protein, 98 aa, Homo sapiens
EVQLVQSGAEVKKPGESLKISCKGSGYTFRSHWIAWVRQVPGKGLEWMGNIYCGDSESIYSPSFQGQVTFSADKSISTAYLQWSSLKASDTAIYYCAR

SEQ ID NO: 9093 - protein, 117 aa, Homo sapiens
EVQLVQSGAEVKKPGESLKISCKGSGYTFRSHWIAWVRQVPGKGLEWMGNIYCGDSESIYSPSFQGQVTFSADKSISTAYLQWSSLKASDTAIYYCARRTDSGVDFWGQGTLVTVSS

SEQ ID NO: 9094 - protein, 98 aa, Homo sapiens
EVQLVQSGAEVKKPGESLKISCKGSGYTFSSYWIAWVRQTPGTGLEWMGNIYPRDSDTAYSPSFEGQVTFSADTSINTAYLEWSSLRASDTAIYYCAR

SEQ ID NO: 9095 - protein, 117 aa, Homo sapiens
EVQLVQSGAEVKKPGESLKISCKGSGYTFSSYWIAWVRQTPGTGLEWMGNIYPRDSDTAYSPSFEGQVTFSADTSINTAYLEWSSLRASDTAIYYCARRSTDDMDVWGQGTRVTVSS

SEQ ID NO: 9096 - protein, 98 aa, Homo sapiens
EVQLVQSGAEVKKPGESLKISCKGSRDIFTNDWIGWVRQMPGKGLEWMGIIYPGDSDTRYSPSFQGQVTISADKSINTAHLQWSSLKASDTAMYYCAR

SEQ ID NO: 9097 - protein, 117 aa, Homo sapiens
EVQLVQSGAEVKKPGESLKISCKGSRDIFTNDWIGWVRQMPGKGLEWMGIIYPGDSDTRYSPSFQGQVTISADKSINTAHLQWSSLKASDTAMYYCARLRGAAFDYWGQGTVVTVSS

SEQ ID NO: 9098 - protein, 98 aa, Homo sapiens
EVQLVQSGAEVKKPGESLKISCQASGFSFNTHWIGWVRQLPGKGLEWMGIIYPGDSDTKYSPSFQGHVTISADKSINTAYLQWNSLRASDTAMYYCAR

SEQ ID NO: 9099 - protein, 117 aa, Homo sapiens
EVQLVQSGAEVKKPGESLKISCQASGFSFNTHWIGWVRQLPGKGLEWMGIIYPGDSDTKYSPSFQGHVTISADKSINTAYLQWNSLRASDTAMYYCARRANSAYDYWGQGTLVTVSS

SEQ ID NO: 9100 - protein, 98 aa, Homo sapiens
EVQLVQSGAEVKKPGESLKISCQASGLSFNTHWIGWVRQMPGKGLEWMGIIYPGDSDTRYSPSFQGQVTISADKSINTAYLQWSSLKASDTAMYYCAR

SEQ ID NO: 9101 - protein, 117 aa, Homo sapiens
EVQLVQSGAEVKKPGESLKISCQASGLSFNTHWIGWVRQMPGKGLEWMGIIYPGDSDTRYSPSFQGQVTISADKSINTAYLQWSSLKASDTAMYYCARRANSAYDYWGQGTLVTVSS

SEQ ID NO: 9102 - protein, 98 aa, Homo sapiens
EVQLVQSGAEVKKPGESLKISCQASGYNFANNWVGWVRQMPGKGLEWMAIIYPGDSDTKYSPSFQGHVTISGDKSISTAYLQWNSLKTSDTAMYYCAR

SEQ ID NO: 9103 - protein, 117 aa, Homo sapiens
EVQLVQSGAEVKKPGESLKISCQASGYNFANNWVGWVRQMPGKGLEWMAIIYPGDSDTKYSPSFQGHVTISGDKSISTAYLQWNSLKTSDTAMYYCARLRGHVFDIWGQGTMVIVSS

SEQ ID NO: 9104 - protein, 98 aa, Homo sapiens
EVQLVQSGAEVKKPGESLKISCQGSGYSFTTYWIVWVRQMPGKGLEWMGIIYPGDSDTRYSPSFQGQVTISADKSISTAYLQWSSLKASDTAMYYCAR

SEQ ID NO: 9105 - protein, 123 aa, Homo sapiens
EVQLVQSGAEVKKPGESLKISCQGSGYSFTTYWIVWVRQMPGKGLEWMGIIYPGDSDTRYSPSFQGQVTISADKSISTAYLQWSSLKASDTAMYYCARRIAIPGTSWYYFDYWGQGTLVTVSS

SEQ ID NO: 9106 - protein, 98 aa, Homo sapiens
EVQLVQSGAEVKKPGESLKISCRGSGYDFNSHWIGWVRQTPGKGLEWMGIIYPRDSETTYSPSFQGQVTFSVDKSINTAYLQWSSLQASDSGMYYCAR

SEQ ID NO: 9107 - protein, 118 aa, Homo sapiens
EVQLVQSGAEVKKPGESLKISCRGSGYDFNSHWIGWVRQTPGKGLEWMGIIYPRDSETTYSPSFQGQVTFSVDKSINTAYLQWSSLQASDSGMYYCARRSTVAAGDYWGQGTPVTVSS

SEQ ID NO: 9108 - protein, 98 aa, Homo sapiens
EVQLVQSGAEVKKPGESLKLSCEGSGYSFTNYWIAWVRQMPGKGLEWMGNIYPGDSATRYSPSFQGQVTISADKSIHTAYLQWSSLKASDTAIYYCAR

SEQ ID NO: 9109 - protein, 118 aa, Homo sapiens
EVQLVQSGAEVKKPGESLKLSCEGSGYSFTNYWIAWVRQMPGKGLEWMGNIYPGDSATRYSPSFQGQVTISADKSIHTAYLQWSSLKASDTAIYYCARRHTDYNLDVWGNGTTVTVSS

SEQ ID NO: 9110 - protein, 97 aa, Homo sapiens
EVQLVQSGAEVKKPGESLRISCKGSGYSFASYWISWVRQMPGKGLEWMGRIDPRDSYTKYSPSFQGHVTISVDKSISTAYLQWSSLKASDTAVYYCA

SEQ ID NO: 9111 - protein, 128 aa, Homo sapiens
EVQLVQSGAEVKKPGESLRISCKGSGYSFASYWISWVRQMPGKGLEWMGRIDPRDSYTKYSPSFQGHVTISVDKSISTAYLQWSSLKASDTAVYYCATNDPDTYYYDDSGANYGMDVWGQGTTVTVSS

SEQ ID NO: 9112 - protein, 97 aa, Homo sapiens
EVQLVQSGAEVKKPGESLRISCKGSGYSFASYWISWVRQMPGKGLEWMGRIDPRDSYTRYSPSFQGHVTISVDKSINTAYLQWSSVKASDTAMYYCA

SEQ ID NO: 9113 - protein, 128 aa, Homo sapiens
EVQLVQSGAEVKKPGESLRISCKGSGYSFASYWISWVRQMPGKGLEWMGRIDPRDSYTRYSPSFQGHVTISVDKSINTAYLQWSSVKASDTAMYYCATNDPDTYYYDDSGANYGMDVWGQGTTVTVSS

SEQ ID NO: 9114 - protein, 98 aa, Homo sapiens
EVQLVQSGAEVKKPGQSVKISCKGSGYSFSTHWIGWVRQKPGKGLEWMGNIYPGDSDTIYSPSFEGQVTFSADKSISTAYLHWSSLRASDSAMYYCAR

SEQ ID NO: 9115 - protein, 117 aa, Homo sapiens
EVQLVQSGAEVKKPGQSVKISCKGSGYSFSTHWIGWVRQKPGKGLEWMGNIYPGDSDTIYSPSFEGQVTFSADKSISTAYLHWSSLRASDSAMYYCARRIEGGFDPWGQGTLVTVSS

SEQ ID NO: 9116 - protein, 98 aa, Homo sapiens
EVQLVQSGAEVKTPGESLKISCLGSGYSFTNYWIGWVRQMPGKGLEWMGIIFPGDSDTRYSPSSQGQVTISADKSTNTAYLHWSSLKASDTAMYYCAR

SEQ ID NO: 9117 - protein, 123 aa, Homo sapiens
EVQLVQSGAEVKTPGESLKISCLGSGYSFTNYWIGWVRQMPGKGLEWMGIIFPGDSDTRYSPSSQGQVTISADKSTNTAYLHWSSLKASDTAMYYCARHVFVGATLRGPMDIWGQGTMVTVSS

SEQ ID NO: 9118 - protein, 95 aa, Homo sapiens
EVQLVQSGAEVRKPGATVRISCKVSGFTLSDSYMHWVQKAPGKGLEWMGLIDPEVDETQYTEKFQGRLTISADTSRDTVYMDLSDLRSEDTAVYY

SEQ ID NO: 9119 - protein, 125 aa, Homo sapiens
EVQLVQSGAEVRKPGATVRISCKVSGFTLSDSYMHWVQKAPGKGLEWMGLIDPEVDETQYTEKFQGRLTISADTSRDTVYMDLSDLRSEDTAVYYCVKEGSDISTHYHPQILHYWGQGTLITVSS

SEQ ID NO: 9120 - protein, 97 aa, Homo sapiens
EVQLVQSGAEVRKPGESLKISCEGSGNSFINYWIAWWRQMPEKGLEWVGMIHPSDSDTRYSPSFQGQVTISADKSITTAYLQWSSLKASDTAIYYCA

SEQ ID NO: 9121 - protein, 122 aa, Homo sapiens
EVQLVQSGAEVRKPGESLKISCEGSGNSFINYWIAWWRQMPEKGLEWVGMIHPSDSDTRYSPSFQGQVTISADKSITTAYLQWSSLKASDTAIYYCARINSSWPSLGPLDIWGQGTMVTVSS

SEQ ID NO: 9122 - protein, 98 aa, Homo sapiens
EVQLVQSGAEVRKPGESLKISCKGSGYTFASYWIAWVRQMPGKGLEWMGVIYPGDSDTRYSPSFQGQVTISADKSISTAYLQWSSLEASDTAMYFCAR

SEQ ID NO: 9123 - protein, 118 aa, Homo sapiens
EVQLVQSGAEVRKPGESLKISCKGSGYTFASYWIAWVRQMPGKGLEWMGVIYPGDSDTRYSPSFQGQVTISADKSISTAYLQWSSLEASDTAMYFCARRSSESGTDYWGQGTQVTVSS

SEQ ID NO: 9124 - protein, 98 aa, Homo sapiens
EVQLVQSGAEVRKPGESLKISCKGSGYTFASYWIAWVRQMPGKGLEWMGVIYPGDSDTRYSPSFQGQVTISADKSISTAYLQWSSLKASDTAMYYCAR

SEQ ID NO: 9125 - protein, 118 aa, Homo sapiens
EVQLVQSGAEVRKPGESLKISCKGSGYTFASYWIAWVRQMPGKGLEWMGVIYPGDSDTRYSPSFQGQVTISADKSISTAYLQWSSLKASDTAMYYCARRSSESGTDYWGQGTLVTVSS

SEQ ID NO: 9126 - protein, 97 aa, Homo sapiens
EVQLVQSGAEVRKPGTTVKISCKVSGLSLTDTFLHWVQQAPGGGLEWMGLIDAENGETVYAEKFRGRVTISADTSTGTANMELSSLTSDDTAVYYCA

SEQ ID NO: 9127 - protein, 120 aa, Homo sapiens
EVQLVQSGAEVRKPGTTVKISCKVSGLSLTDTFLHWVQQAPGGGLEWMGLIDAENGETVYAEKFRGRVTISADTSTGTANMELSSLTSDDTAVYYCARAISATGDWLDPWGQGTLVTVSS

SEQ ID NO: 9128 - protein, 97 aa, Homo sapiens
EVQLVQSGAQVKKPGESLKISCKTSGYSFTDDWIGWVRQMPGKGLEWMGIIYPGDSDTKYSPSFEGQVTISSDKSIRTAYLQWRSLKASDTAIYYCA

SEQ ID NO: 9129 - protein, 117 aa, Homo sapiens
EVQLVQSGAQVKKPGESLKISCKTSGYSFTDDWIGWVRQMPGKGLEWMGIIYPGDSDTKYSPSFEGQVTISSDKSIRTAYLQWRSLKASDTAIYYCARLLGARFDYWGQGTLVTVSS

SEQ ID NO: 9130 - protein, 96 aa, Homo sapiens
EVQLVQSGAVVKKPGAAVKISCKVSGYTFTDYSMHWVKQAPGKGLEWMGLIDPEDGEAIYAAKFQGRATITADTSRDTAYMELSSLRSEDTAVYYC

SEQ ID NO: 9131 - protein, 119 aa, Homo sapiens
EVQLVQSGAVVKKPGAAVKISCKVSGYTFTDYSMHWVKQAPGKGLEWMGLIDPEDGEAIYAAKFQGRATITADTSRDTAYMELSSLRSEDTAVYYCLLYQIAEGYFDFWGQGTLVTVSS

SEQ ID NO: 9132 - protein, 98 aa, Homo sapiens
EVQLVQSGAVVKKPGESLKISCKASGYTFTSYWIAWVRQMPEKGLEWMGIIYPGDSDTKYSPSFQGQVTISADKSTSTVYLHWSSLKASDTAMYYCAR

SEQ ID NO: 9133 - protein, 118 aa, Homo sapiens
EVQLVQSGAVVKKPGESLKISCKASGYTFTSYWIAWVRQMPEKGLEWMGIIYPGDSDTKYSPSFQGQVTISADKSTSTVYLHWSSLKASDTAMYYCARRETVVGVDYWGQGTLVTVSS

SEQ ID NO: 9134 - protein, 98 aa, Homo sapiens
EVQLVQSGEEVKKPGESLKISCKASGYGFSNFWIGWVRQMSGRGLEWMGSIYPGDSDIKYNPSFQGQVTISADKSISTAYLQWSSLKASDSAMYYCVR

SEQ ID NO: 9135 - protein, 120 aa, Homo sapiens
EVQLVQSGEEVKKPGESLKISCKASGYGFSNFWIGWVRQMSGRGLEWMGSIYPGDSDIKYNPSFQGQVTISADKSISTAYLQWSSLKASDSAMYYCVRQYEFVWGAYLYWGQGTLVTVSS

SEQ ID NO: 9136 - protein, 98 aa, Homo sapiens
EVQLVQSGGEVKKPGESLKISCKASGYNFINFWIGWVRQMPGKGLEWMGVIYPGDSDIRYSQSFQGQVTMSVDKSISTAYLQWTSLKASDTATYYCAR

SEQ ID NO: 9137 - protein, 126 aa, Homo sapiens
EVQLVQSGGEVKKPGESLKISCKASGYNFINFWIGWVRQMPGKGLEWMGVIYPGDSDIRYSQSFQGQVTMSVDKSISTAYLQWTSLKASDTATYYCARPRGYYGSGLYYHSAFDIWGQGTVVTVSS

SEQ ID NO: 9138 - protein, 95 aa, Homo sapiens
EVQLVQSGGGLAQPGGSLRLSCAASEFTFRNYDMHWVRTGEGLEWVSSINTAGETFYPASVKGRFTISRDDGKTSLYLQMNNLSAGDTAVYYCAR

SEQ ID NO: 9139 - protein, 123 aa, Homo sapiens
EVQLVQSGGGLAQPGGSLRLSCAASEFTFRNYDMHWVRTGEGLEWVSSINTAGETFYPASVKGRFTISRDDGKTSLYLQMNNLSAGDTAVYYCARTMAWTKKSTSSDWYFDLWGRGTLVTVSS

SEQ ID NO: 9140 - protein, 98 aa, Homo sapiens
EVQLVQSGGGLGQRGGSLRLSCAASGFTFRNYVMTWVRQAPGKGLEWVSSISATGLSTYYTDSVKGRFTVSRDNSKDTVYLQMNSLRDEDTAVYYCAK

SEQ ID NO: 9141 - protein, 123 aa, Homo sapiens
EVQLVQSGGGLGQRGGSLRLSCAASGFTFRNYVMTWVRQAPGKGLEWVSSISATGLSTYYTDSVKGRFTVSRDNSKDTVYLQMNSLRDEDTAVYYCAKDASVRIPTTGSSDHWGQGTLVAVSS

SEQ ID NO: 9142 - protein, 101 aa, Homo sapiens
EVQLVQSGGGLVKPGESLRLSCAASGFIFSTYNMNWVRQAPGKGLEWVSSISGSSGERSHISYADSVKGRFTISRDDAKNSLYLQMNSLRAEDTAVYYCAR

SEQ ID NO: 9143 - protein, 126 aa, Homo sapiens
EVQLVQSGGGLVKPGESLRLSCAASGFIFSTYNMNWVRQAPGKGLEWVSSISGSSGERSHISYADSVKGRFTISRDDAKNSLYLQMNSLRAEDTAVYYCARDGVSNYEEGGWFDPWGQGTLVTVSS

SEQ ID NO: 9144 - protein, 98 aa, Homo sapiens
EVQLVQSGGGLVQPGGSLRLSCAASGFTFSDYWMSWVRQAPGKGLEWVANIKEDGSENNYVDSVKGRFTISRDIAKNSLYLQMNSLRAEDTAVYYCAR

SEQ ID NO: 9145 - protein, 122 aa, Homo sapiens
EVQLVQSGGGLVQPGGSLRLSCAASGFTFSDYWMSWVRQAPGKGLEWVANIKEDGSENNYVDSVKGRFTISRDIAKNSLYLQMNSLRAEDTAVYYCARGYFESSGYRPYDFWGQGTLVTVSS

SEQ ID NO: 9146 - protein, 98 aa, Homo sapiens
EVQLVQSGGGVVQPGGSLRLSCAASGFIFTDYVMSWVRLAPGRGLEWVSSISASGISTYYADSVKGRFTISRDKSKNTLYLQLNSLRAEDTAMYYCAK

SEQ ID NO: 9147 - protein, 123 aa, Homo sapiens
EVQLVQSGGGVVQPGGSLRLSCAASGFIFTDYVMSWVRLAPGRGLEWVSSISASGISTYYADSVKGRFTISRDKSKNTLYLQLNSLRAEDTAMYYCAKDLVRPVPGTGYFESWGQGTLVTVSS

SEQ ID NO: 9148 - protein, 98 aa, Homo sapiens
EVQLVQSGPEVKKPGATVQISCNVSGYTFTDYFMHWVRQAPGKGLEWMGRIDPEDGETNYAEKFQGRVTISADRSTDTTYMELSSLTSDDTAIYYCVT

SEQ ID NO: 9149 - protein, 120 aa, Homo sapiens
EVQLVQSGPEVKKPGATVQISCNVSGYTFTDYFMHWVRQAPGKGLEWMGRIDPEDGETNYAEKFQGRVTISADRSTDTTYMELSSLTSDDTAIYYCVTEGYSSAPHALDVWGQGTRVSVS

SEQ ID NO: 9150 - protein, 98 aa, Homo sapiens
EVQLVQSGTDVKKPGESLKISCKGSGYSFSSYWIGWVRQRPGKGLELMGIIYPGDSDTRYSPSFQGQVTISVDKSVNTAYLQWSSLKASDSAMYYCAR

SEQ ID NO: 9151 - protein, 121 aa, Homo sapiens
EVQLVQSGTDVKKPGESLKISCKGSGYSFSSYWIGWVRQRPGKGLELMGIIYPGDSDTRYSPSFQGQVTISVDKSVNTAYLQWSSLKASDSAMYYCARRGGEAVAGGWLYWGQGTLVTVSS

SEQ ID NO: 9152 - protein, 97 aa, Homo sapiens
EVQLVQSGTEVKKPGESLKISCKGYGYNFPKYWVGWVRQIPGRGLEWMGIIMPERSETTYNPSFQVQATLSADTSINTAFLQWDSLKASDTAIYYCA

SEQ ID NO: 9153 - protein, 119 aa, Homo sapiens
EVQLVQSGTEVKKPGESLKISCKGYGYNFPKYWVGWVRQIPGRGLEWMGIIMPERSETTYNPSFQVQATLSADTSINTAFLQWDSLKASDTAIYYCAKSTFGGYAMDVWGQGTAVSVSS

SEQ ID NO: 9154 - protein, 98 aa, Homo sapiens
EVQLVQSGVEVKKPGESLRISCQGSGYTFSSYWIAWVRQTPGKGLEWMGNIYPGDSDTKYSQSFQGQVTFSVDKSINTAYLQWSSLKASDTAIYYCAR

SEQ ID NO: 9155 - protein, 118 aa, Homo sapiens
EVQLVQSGVEVKKPGESLRISCQGSGYTFSSYWIAWVRQTPGKGLEWMGNIYPGDSDTKYSQSFQGQVTFSVDKSINTAYLQWSSLKASDTAIYYCARRHTDYNMDVWGRGTPVTVSS

SEQ ID NO: 9156 - protein, 98 aa, Homo sapiens
EVQLVQSRAEVKKPGESLKISCKGSGYSFTKYWIGWVRQMPGKGLEWMGIIYPGDSDTRYNPSFQGQVTISADKSISTAYLQWSSLKASDTAVYYCAR

SEQ ID NO: 9157 - protein, 122 aa, Homo sapiens
EVQLVQSRAEVKKPGESLKISCKGSGYSFTKYWIGWVRQMPGKGLEWMGIIYPGDSDTRYNPSFQGQVTISADKSISTAYLQWSSLKASDTAVYYCARHWALYSSSSVLQHWGQGTQVTVSS

SEQ ID NO: 9158 - protein, 98 aa, Homo sapiens
EVQLVQSRAEVKKPGESLKISCKGSGYTFTSYWIGWVRQMPGKGLEWMGIIYPGDSDTRYRPSFQGQVTISADKSISTAYLQWRSLKASDTAMYYCAR

SEQ ID NO: 9159 - protein, 132 aa, Homo sapiens
EVQLVQSRAEVKKPGESLKISCKGSGYTFTSYWIGWVRQMPGKGLEWMGIIYPGDSDTRYRPSFQGQVTISADKSISTAYLQWRSLKASDTAMYYCARARQIYCSGGPCYVGFKTNDAFDMWGQGTMVTVSS

SEQ ID NO: 9160 - protein, 97 aa, Homo sapiens
EVQLWESGGGLVQPGGSLRLSCAASGYTFSNYAMSWVRQAPGKGLEWISTINKKGDNTHYADSVKGRFTISRDNSRNTLYLQMHNVRVEDTAVFYCA

SEQ ID NO: 9161 - protein, 132 aa, Homo sapiens
EVQLWESGGGLVQPGGSLRLSCAASGYTFSNYAMSWVRQAPGKGLEWISTINKKGDNTHYADSVKGRFTISRDNSRNTLYLQMHNVRVEDTAVFYCAKRGYSERVLRYFDWVSWEGDYFDYWGQGTLVTVSS

SEQ ID NO: 9162 - protein, 98 aa, Homo sapiens
EVQLWESGGGLVRPGGSLRLSCAASGFTFYTYAMNWVRQSPGKGLEWVSVIAGSGDSTSYGDSVKGRFTISRDNSKNVVYLQMNSLRAEDTAFYYCAK

SEQ ID NO: 9163 - protein, 125 aa, Homo sapiens
EVQLWESGGGLVRPGGSLRLSCAASGFTFYTYAMNWVRQSPGKGLEWVSVIAGSGDSTSYGDSVKGRFTISRDNSKNVVYLQMNSLRAEDTAFYYCAKGQLWDRSVTFYRPLESWGRGTLVTVSS

SEQ ID NO: 9164 - protein, 98 aa, Homo sapiens
EVQMLESGGGLIHPGGSLRLSCAASGFTVSSYAISWVRQAPGKGLEWVSSLGGSGSGTYYAGSVKGRFTMSRDTSKNTVFLLMSSLTVEDTAMYYCAK

SEQ ID NO: 9165 - protein, 125 aa, Homo sapiens
EVQMLESGGGLIHPGGSLRLSCAASGFTVSSYAISWVRQAPGKGLEWVSSLGGSGSGTYYAGSVKGRFTMSRDTSKNTVFLLMSSLTVEDTAMYYCAKDWGPKDTSAYDEALDIWGQGTMVTVSA

SEQ ID NO: 9166 - protein, 97 aa, Homo sapiens
EVQMVESGGGLVQPGGSLRLSCAVSGFTFSNFWMNWVRQAPGKGLEWVANIKDDGSEKFYVDSVKGRFTISRDNAKKSLYLQMNSLRAEDTAVYYCS

SEQ ID NO: 9167 - protein, 115 aa, Homo sapiens
EVQMVESGGGLVQPGGSLRLSCAVSGFTFSNFWMNWVRQAPGKGLEWVANIKDDGSEKFYVDSVKGRFTISRDNAKKSLYLQMNSLRAEDTAVYYCSTGHYTGQWGQGTLVTVSA

SEQ ID NO: 9168 - protein, 97 aa, Homo sapiens
EVQMVESGGGLVQPGGSLRLSCTASGFMFSRYWMTWVRQAPGKGLEWVANIKEDGSDEYYADSVKGRFAVSRDNAKNSLYLQMNSLRAEDTAVYFCA

SEQ ID NO: 9169 - protein, 115 aa, Homo sapiens
EVQMVESGGGLVQPGGSLRLSCTASGFMFSRYWMTWVRQAPGKGLEWVANIKEDGSDEYYADSVKGRFAVSRDNAKNSLYLQMNSLRAEDTAVYFCATFYPDDYRGQGTLVTVSS

SEQ ID NO: 9170 - protein, 98 aa, Homo sapiens
EVQMVQSGAEVKKPGESLQISCKGSGYSFTTYWIGWVRQMPEKGLEWVAIIYPGDSSVRYSPPFQGRVTISADKSISTAYLQWSTLKPSDTAIYYCAR

SEQ ID NO: 9171 - protein, 124 aa, Homo sapiens
EVQMVQSGAEVKKPGESLQISCKGSGYSFTTYWIGWVRQMPEKGLEWVAIIYPGDSSVRYSPPFQGRVTISADKSISTAYLQWSTLKPSDTAIYYCARHRRSREDPGYDHEDSWGQGTLVTVSS

SEQ ID NO: 9172 - protein, 98 aa, Homo sapiens
EVQVVASGGGLVQPGGSLRLSCAASGFTFSDTWMSWVRQAPGKGLDWVANINPDGSEEYYADSVKGRFIISRDNARNSLSLQMNSLRADDTAVYYCAR

SEQ ID NO: 9173 - protein, 115 aa, Homo sapiens
EVQVVASGGGLVQPGGSLRLSCAASGFTFSDTWMSWVRQAPGKGLDWVANINPDGSEEYYADSVKGRFIISRDNARNSLSLQMNSLRADDTAVYYCARFANLGNWGQGILVTVSS

SEQ ID NO: 9174 - protein, 98 aa, Homo sapiens
EVQVVDSGGDLVQPGGSLRLSCEASGFPFSTYWMSWVRQAPGKGLEWVANIKPDGSKKNYVDSVRGRFTISRDNAKNSVYLQMNSLRVEDTGVYFCAR

SEQ ID NO: 9175 - protein, 125 aa, Homo sapiens
EVQVVDSGGDLVQPGGSLRLSCEASGFPFSTYWMSWVRQAPGKGLEWVANIKPDGSKKNYVDSVRGRFTISRDNAKNSVYLQMNSLRVEDTGVYFCARDYCNGDNCPRQSWGDFWGQGTLVSVSA

SEQ ID NO: 9176 - protein, 98 aa, Homo sapiens
EVQVVESGGALVRPGGSLRLSCAGSGFTFGDYWMAWVRQVPGKGLEWVASIKEDGSEKYYGDSVKGRITISRDNAKKSLYLQLTSLRVEDTALYHCVK

SEQ ID NO: 9177 - protein, 126 aa, Homo sapiens
EVQVVESGGALVRPGGSLRLSCAGSGFTFGDYWMAWVRQVPGKGLEWVASIKEDGSEKYYGDSVKGRITISRDNAKKSLYLQLTSLRVEDTALYHCVKDGASCGGDCDMPQYFQDWGQGTLVTVSS

SEQ ID NO: 9178 - protein, 96 aa, Homo sapiens
EVQVVESGGGLIQPGGSLRLSCAASRFTVRSYYMTWVRQAPGKGLEWVSVIYSGGSTYYADSVKGRFTISRDNSKNTVYLQMNSLRVEDTAVYYCA

SEQ ID NO: 9179 - protein, 115 aa, Homo sapiens
EVQVVESGGGLIQPGGSLRLSCAASRFTVRSYYMTWVRQAPGKGLEWVSVIYSGGSTYYADSVKGRFTISRDNSKNTVYLQMNSLRVEDTAVYYCAITQGPLDYWGQGTLVTVSS

SEQ ID NO: 9180 - protein, 100 aa, Homo sapiens
EVQVVESGGGLVKPGGSLRLSCGASGFIFSNAWMSWVRQAPGGGLEWVGRIKSNPNGGTRDYAAPVKGRFTISRDDSKNLMYLQMNSLKAEDTGVYYCTI

SEQ ID NO: 9181 - protein, 131 aa, Homo sapiens
EVQVVESGGGLVKPGGSLRLSCGASGFIFSNAWMSWVRQAPGGGLEWVGRIKSNPNGGTRDYAAPVKGRFTISRDDSKNLMYLQMNSLKAEDTGVYYCTIVKRFYDSLTGYSEVGEYFQYWGRGTLVTVSS

SEQ ID NO: 9182 - protein, 97 aa, Homo sapiens
EVQVVESGGGLVQPGGSLRLSCAASGFMFSGYWMTWVRQAPGKGLEWVANIKEDGSAEYYVDSVKGRFVVSRDNAKNSLYLQMNSLRAEDTAVYYCG

SEQ ID NO: 9183 - protein, 115 aa, Homo sapiens
EVQVVESGGGLVQPGGSLRLSCAASGFMFSGYWMTWVRQAPGKGLEWVANIKEDGSAEYYVDSVKGRFVVSRDNAKNSLYLQMNSLRAEDTAVYYCGSFYPDDYRGQGTLVTVSS

SEQ ID NO: 9184 - protein, 98 aa, Homo sapiens
EVQVVESGGGLVQPGGSLRLSCAASGFNFGTYWMSWVRQAPGKGLEWVANIKEDGSKSYYVDSVKGRFTISRDNAKNSLFLQMNSLRGDDTAIYYCAR

SEQ ID NO: 9185 - protein, 126 aa, Homo sapiens
EVQVVESGGGLVQPGGSLRLSCAASGFNFGTYWMSWVRQAPGKGLEWVANIKEDGSKSYYVDSVKGRFTISRDNAKNSLFLQMNSLRGDDTAIYYCARDQKIYCSSDTCYWAFDDWGQGTLVTVSS

SEQ ID NO: 9186 - protein, 98 aa, Homo sapiens
EVQVVESGGGLVQPGGSLRLSCAASGFSFSTYWMSWVRQAPGKGLEWVASIKEDGSEKNYVDSVKGRFTISRENAKNSVYLQVSSLRAEDTAVYYCGR

SEQ ID NO: 9187 - protein, 124 aa, Homo sapiens
EVQVVESGGGLVQPGGSLRLSCAASGFSFSTYWMSWVRQAPGKGLEWVASIKEDGSEKNYVDSVKGRFTISRENAKNSVYLQVSSLRAEDTAVYYCGRLHQDEGVTGYRAIESWGQGTLVTVSS

SEQ ID NO: 9188 - protein, 97 aa, Homo sapiens
EVQVVESGGGLVQPGGSLRLSCAASGFTFSKNWMTWVRQAPGKGLEWVATIKPDGTETYYVDSVKGRFTISRDNAQNLLFLQLNSLRVEDTAVYHCA

SEQ ID NO: 9189 - protein, 115 aa, Homo sapiens
EVQVVESGGGLVQPGGSLRLSCAASGFTFSKNWMTWVRQAPGKGLEWVATIKPDGTETYYVDSVKGRFTISRDNAQNLLFLQLNSLRVEDTAVYHCASLWEGGYWGQGTLVTVSS

SEQ ID NO: 9190 - protein, 98 aa, Homo sapiens
EVQVVESGGGLVQPGGSLRLSCAASGFTFSSYWMSWVRQAPGKGLEWVANIKQDGSENHYVDSVKGRFTISRDNANNLLYLQMNSLRADDTAVYFCAR

SEQ ID NO: 9191 - protein, 125 aa, Homo sapiens
EVQVVESGGGLVQPGGSLRLSCAASGFTFSSYWMSWVRQAPGKGLEWVANIKQDGSENHYVDSVKGRFTISRDNANNLLYLQMNSLRADDTAVYFCARLGFADRSSTAYRHADCWGQGTLVTVSS

SEQ ID NO: 9192 - protein, 98 aa, Homo sapiens
EVQVVESGGGLVQPGGSLRLSCVASGFSFSDSNMNWVRQAPGKGLEWLSYTDKNSKTIYYAVSIKGRFTISRDNAKDSLFLQMNSLRAEDTAVYYCAR

SEQ ID NO: 9193 - protein, 120 aa, Homo sapiens
EVQVVESGGGLVQPGGSLRLSCVASGFSFSDSNMNWVRQAPGKGLEWLSYTDKNSKTIYYAVSIKGRFTISRDNAKDSLFLQMNSLRAEDTAVYYCARDDYYESSGYIPWGQGTLVTVSS

SEQ ID NO: 9194 - protein, 98 aa, Homo sapiens
EVQVVESGGGLVQPGGSLRLSCVTSGYTFSNFWMTWVRQAPGKGLEWVANIKNDGSKTYYVDSVKGRFTISRDNAQNSLYLQMNSLGVEDTAVYYCAR

SEQ ID NO: 9195 - protein, 121 aa, Homo sapiens
EVQVVESGGGLVQPGGSLRLSCVTSGYTFSNFWMTWVRQAPGKGLEWVANIKNDGSKTYYVDSVKGRFTISRDNAQNSLYLQMNSLGVEDTAVYYCARDPRDSEYAIFDYWGQGILVTVSS

SEQ ID NO: 9196 - protein, 98 aa, Homo sapiens
EVQVVESGGGLVQPGGSLSLSCAASGFTFSSYEMNWVRQAPGKGLEWVSYISSSGGSRYYADSVKGRFTISRDNAKNSLYLQMNSVRVEDTAVYYCAR

SEQ ID NO: 9197 - protein, 122 aa, Homo sapiens
EVQVVESGGGLVQPGGSLSLSCAASGFTFSSYEMNWVRQAPGKGLEWVSYISSSGGSRYYADSVKGRFTISRDNAKNSLYLQMNSVRVEDTAVYYCARDRVTTVFGVGIDSWGQGTLVTVST

SEQ ID NO: 9198 - protein, 98 aa, Homo sapiens
EVQVVESGGGLVQPGRSLRLSCRVSGFSFVDYAINWVRQAPGKGLQWVSYIRHKASGGTIEYAASVKGRFIISRDDSKNTAYLQMNSLRVEDTAVYYC

SEQ ID NO: 9199 - protein, 122 aa, Homo sapiens
EVQVVESGGGLVQPGRSLRLSCRVSGFSFVDYAINWVRQAPGKGLQWVSYIRHKASGGTIEYAASVKGRFIISRDDSKNTAYLQMNSLRVEDTAVYYCVAGGYDFSDRVDYWGRGAVVTVSS

SEQ ID NO: 9200 - protein, 16 aa, Homo sapiens
EVREDVVMGAAYYFDY

SEQ ID NO: 9201 - protein, 18 aa, Homo sapiens
EVRFGDDILTGYSDAFDF

SEQ ID NO: 9202 - protein, 19 aa, Homo sapiens
EVRFRYGSGSYYNLRWFDP

SEQ ID NO: 9203 - protein, 15 aa, Homo sapiens
EVRINGLPPQFCFDS

SEQ ID NO: 9204 - protein, 97 aa, Homo sapiens
EVRLEESGGGLVQPGGSLRLSCAASGFTVSSKYMSWVRQAPGKGLEWVSVIYSGDITYYSNSVRGRFTISRDNSRNTLYLQMNSLRAEDTAVYYCAR

SEQ ID NO: 9205 - protein, 119 aa, Homo sapiens
EVRLEESGGGLVQPGGSLRLSCAASGFTVSSKYMSWVRQAPGKGLEWVSVIYSGDITYYSNSVRGRFTISRDNSRNTLYLQMNSLRAEDTAVYYCARGTDSAATRVDAWGQGTTVTVSS

SEQ ID NO: 9206 - protein, 98 aa, Homo sapiens
EVRLEESGGGLVQTGGSLKLSCAASGFTFSRNWMSWVRQAPGKGLEWVANIKQDGSEKVYVDSVKGRFSISRDNAENTLYLQMNNLRAEDTALYYCAR

SEQ ID NO: 9207 - protein, 127 aa, Homo sapiens
EVRLEESGGGLVQTGGSLKLSCAASGFTFSRNWMSWVRQAPGKGLEWVANIKQDGSEKVYVDSVKGRFSISRDNAENTLYLQMNNLRAEDTALYYCARDPYCGGDCPGGSFGAFDIWGQGTMVTVSS

SEQ ID NO: 9208 - protein, 98 aa, Homo sapiens
EVRLLESGGGLVQPGGSLRLSCAASGFTFSSYVMNWVRQAPGKGLEWVSSISGSGISTYYADSVKGRFTISRDSSKNALYLQMNSLSAEDTAVYYCAK

SEQ ID NO: 9209 - protein, 122 aa, Homo sapiens
EVRLLESGGGLVQPGGSLRLSCAASGFTFSSYVMNWVRQAPGKGLEWVSSISGSGISTYYADSVKGRFTISRDSSKNALYLQMNSLSAEDTAVYYCAKSVKGIVAAGLFDYWGQGTLVPVSS

SEQ ID NO: 9210 - protein, 97 aa, Homo sapiens
EVRLVESGGDLVQPGGSLSLSCAVSGFSFRNYWMSWVRQAPGKGLQWVATIKKDGSEKYYVDSVKGRFTISRDNAKNSLFLQVSSLRADDTAIYYCV

SEQ ID NO: 9211 - protein, 123 aa, Homo sapiens
EVRLVESGGDLVQPGGSLSLSCAVSGFSFRNYWMSWVRQAPGKGLQWVATIKKDGSEKYYVDSVKGRFTISRDNAKNSLFLQVSSLRADDTAIYYCVTIQDDDASRYRPFDVWGQGIMVTVSS

SEQ ID NO: 9212 - protein, 98 aa, Homo sapiens
EVRLVESGGGLVEPGGSLRLSCLTSGFAFSGHAMNWVRQAPGKGLEWVAYIRINGGGTYYADSVKGRFTISIDNAKNSLYLEMNNLREDDAAVYYCAR

SEQ ID NO: 9213 - protein, 121 aa, Homo sapiens
EVRLVESGGGLVEPGGSLRLSCLTSGFAFSGHAMNWVRQAPGKGLEWVAYIRINGGGTYYADSVKGRFTISIDNAKNSLYLEMNNLREDDAAVYYCARDRDNTGWYLGDNWGQGTLVSVSS

SEQ ID NO: 9214 - protein, 96 aa, Homo sapiens
EVRLVESGGGLVHPGGSLRLSCAVSGFTVGNNYMSWVRQAPGKGLEWVSVIHSGGNTYYADSLKGRFTISRDASKNTLYLQINSLGAEDTAVYYCA

SEQ ID NO: 9215 - protein, 128 aa, Homo sapiens
EVRLVESGGGLVHPGGSLRLSCAVSGFTVGNNYMSWVRQAPGKGLEWVSVIHSGGNTYYADSLKGRFTISRDASKNTLYLQINSLGAEDTAVYYCARGGSHPIYDYDGSGLLLGFDYWGQGTLVTVSS

SEQ ID NO: 9216 - protein, 98 aa, Homo sapiens
EVRLVESGGGLVQAGRSLRLSCAASGFNFRTYEMNWVRQAPGKGLEWISYISVSANSKYYADSVKGRFTISRDNAKNSLYLQMNSLRAEDTAIYYCTR

SEQ ID NO: 9217 - protein, 122 aa, Homo sapiens
EVRLVESGGGLVQAGRSLRLSCAASGFNFRTYEMNWVRQAPGKGLEWISYISVSANSKYYADSVKGRFTISRDNAKNSLYLQMNSLRAEDTAIYYCTRDAAPGPVFHYMDVWGKGTTVTVSS

SEQ ID NO: 9218 - protein, 98 aa, Homo sapiens
EVRLVESGGGLVQPGGSLRLSCAASGFTFGSHWMSWVRQAPGKGLEWVANIKGDGSEIHYMDSVKGRFAISRDNAKESLFLQMNSLRAEDAAVYYCAK

SEQ ID NO: 9219 - protein, 120 aa, Homo sapiens
EVRLVESGGGLVQPGGSLRLSCAASGFTFGSHWMSWVRQAPGKGLEWVANIKGDGSEIHYMDSVKGRFAISRDNAKESLFLQMNSLRAEDAAVYYCAKDWGDSGKWGDVWGQGTTVIVSS

SEQ ID NO: 9220 - protein, 97 aa, Homo sapiens
EVRLVESGGGLVQPGGSLRLSCAASGFTFNKYWMSWVRQAPGKGLEWVANIKEDGSEKHYVDSVKGRFTISIDNAKNSLYLQMNSLRAEDTSIYYCA

SEQ ID NO: 9221 - protein, 121 aa, Homo sapiens
EVRLVESGGGLVQPGGSLRLSCAASGFTFNKYWMSWVRQAPGKGLEWVANIKEDGSEKHYVDSVKGRFTISIDNAKNSLYLQMNSLRAEDTSIYYCAKLCPDTAYRPVDFWGQGTLVTVSS

SEQ ID NO: 9222 - protein, 97 aa, Homo sapiens
EVRLVESGGGLVQPGGSLRLSCAASGFTVSSKYMSWVRQAPGKGLEWVSVIYSGDITYYSNSVRGRFTISRDNSRNTLYLQMNSLRAEDTAVYYCAR

SEQ ID NO: 9223 - protein, 97 aa, Homo sapiens; identical to SEQ ID NO: 9222

SEQ ID NO: 9224 - protein, 97 aa, Homo sapiens; identical to SEQ ID NO: 9222

SEQ ID NO: 9225 - protein, 97 aa, Homo sapiens; identical to SEQ ID NO: 9222

SEQ ID NO: 9226 - protein, 119 aa, Homo sapiens
EVRLVESGGGLVQPGGSLRLSCAASGFTVSSKYMSWVRQAPGKGLEWVSVIYSGDITYYSNSVRGRFTISRDNSRNTLYLQMNSLRAEDTAVYYCARGTDSAATRVDAWGQGTTVTVSS

SEQ ID NO: 9227 - protein, 119 aa, Homo sapiens; identical to SEQ ID NO: 9226

SEQ ID NO: 9228 - protein, 119 aa, Homo sapiens; identical to SEQ ID NO: 9226

SEQ ID NO: 9229 - protein, 119 aa, Homo sapiens; identical to SEQ ID NO: 9226

SEQ ID NO: 9230 - protein, 98 aa, Homo sapiens
EVRLVESGGGLVQPGGSLRLSCETSGFAFSSYWMAWVRQAPGKGLEWVANIKKDESEKHYVDSVTGRFTISRDNAKNSVYLQMNSLRVEDTAVYYCAR

SEQ ID NO: 9231 - protein, 118 aa, Homo sapiens
EVRLVESGGGLVQPGGSLRLSCETSGFAFSSYWMAWVRQAPGKGLEWVANIKKDESEKHYVDSVTGRFTISRDNAKNSVYLQMNSLRVEDTAVYYCAREPSSVAADYWGQGTLVTVSS

SEQ ID NO: 9232 - protein, 98 aa, Homo sapiens
EVRLVESGGGLVQPGGSLRLSCVASGFTFSRYWMNWVRQVPGKGLEWVAYIKQDGSEKYYVDTVEGRFTISRDNAKASLYLQMSSLRAEDTAVYYCAR

SEQ ID NO: 9233 - protein, 127 aa, Homo sapiens
EVRLVESGGGLVQPGGSLRLSCVASGFTFSRYWMNWVRQVPGKGLEWVAYIKQDGSEKYYVDTVEGRFTISRDNAKASLYLQMSSLRAEDTAVYYCARMSVLDYDKTPGRYRFLDYWGPGTEVTVSS

SEQ ID NO: 9234 - protein, 98 aa, Homo sapiens
EVRLVESGGGLVQPGGSLRLSCVASGFTFSRYWMNWVRQVPGKGLEWVAYIKQDGSEKYYVDTVEGRFTISRDNAKTSLYLQMSSLRAEDTAIYYCAR

SEQ ID NO: 9235 - protein, 127 aa, Homo sapiens
EVRLVESGGGLVQPGGSLRLSCVASGFTFSRYWMNWVRQVPGKGLEWVAYIKQDGSEKYYVDTVEGRFTISRDNAKTSLYLQMSSLRAEDTAIYYCARMSVLDYDKTPDRYRFLDYWGPGTEVTVSS

SEQ ID NO: 9236 - protein, 98 aa, Homo sapiens
EVRLVESGGGLVQPGGSLRLTCVASGFTFDNYWMTWVRQAPGKGLEWVANIKPDGSDEYYVDSMKGRFTISRDNARNSLYLQMNSLRVEDTAVYYCAR

SEQ ID NO: 9237 - protein, 127 aa, Homo sapiens
EVRLVESGGGLVQPGGSLRLTCVASGFTFDNYWMTWVRQAPGKGLEWVANIKPDGSDEYYVDSMKGRFTISRDNARNSLYLQMNSLRVEDTAVYYCARDPWEETNHDSAGYGAFDMWGQGTMVTVSS

SEQ ID NO: 9238 - protein, 98 aa, Homo sapiens
EVRLVESGGGLVQPGGSLSLSCAASGFGFSNYWMHWVRQSPGKGLVWVSRINIDGSRTNYAESVKGRFTISRDNAKNTLYLQMSGLRAEDTAVYYCIR

SEQ ID NO: 9239 - protein, 117 aa, Homo sapiens
EVRLVESGGGLVQPGGSLSLSCAASGFGFSNYWMHWVRQSPGKGLVWVSRINIDGSRTNYAESVKGRFTISRDNAKNTLYLQMSGLRAEDTAVYYCIRDQGGTDDYWGQGTLVTVSS

SEQ ID NO: 9240 - protein, 97 aa, Homo sapiens
EVRLVESGGGLVQPGGSRRLSCVASQFTFTNHAMHWVRQAPGKGPEWVASISGTGISKYYADSVKGRFTISRDNSKNTLSLQLNSLRGEDTALYYCA

SEQ ID NO: 9241 - protein, 123 aa, Homo sapiens
EVRLVESGGGLVQPGGSRRLSCVASQFTFTNHAMHWVRQAPGKGPEWVASISGTGISKYYADSVKGRFTISRDNSKNTLSLQLNSLRGEDTALYYCARDSSNYPPRTGYFDLWGRGTLVTVSS

SEQ ID NO: 9242 - protein, 98 aa, Homo sapiens
EVRLVESGGGLVQPGRSLRLSCAASGFNFDEYAMQWVRQAPGKGLEWVSGISWNSGSIGYADSVRGRFTISRDNSRNTLYLQMNSLRAEDTAVYYCAR

SEQ ID NO: 9243 - protein, 120 aa, Homo sapiens
EVRLVESGGGLVQPGRSLRLSCAASGFNFDEYAMQWVRQAPGKGLEWVSGISWNSGSIGYADSVRGRFTISRDNSRNTLYLQMNSLRAEDTAVYYCARGTDSAATRVDAWGQGTTVTVSS

SEQ ID NO: 9244 - protein, 100 aa, Homo sapiens
EVRLVESGGGLVQSGGSLKVSCAGSGFTFSGSTIHWVRQSSGKGLEWLALIKSGANTYATEYAAAVRGRFTISRDDSQSTAYLQMDGLKTEDTAIYYCIR

SEQ ID NO: 9245 - protein, 129 aa, Homo sapiens
EVRLVESGGGLVQSGGSLKVSCAGSGFTFSGSTIHWVRQSSGKGLEWLALIKSGANTYATEYAAAVRGRFTISRDDSQSTAYLQMDGLKTEDTAIYYCIRHRDVLRYFDWQPPFYFESWGQGTQVTVSS

SEQ ID NO: 9246 - protein, 97 aa, Homo sapiens
EVRLVESGGGLVRPGGSLILSCAASEFTSRNYWMSWVRQAPGKGLEWVSVIYSGDITYYSNSVRGRFTISRDNSRNTLYLQMNSLRAEDTAVYYCAR

SEQ ID NO: 9247 - protein, 119 aa, Homo sapiens
EVRLVESGGGLVRPGGSLILSCAASEFTSRNYWMSWVRQAPGKGLEWVSVIYSGDITYYSNSVRGRFTISRDNSRNTLYLQMNSLRAEDTAVYYCARGTDSAATRVDAWGQGTTVTVSS

SEQ ID NO: 9248 - protein, 97 aa, Homo sapiens
EVRLVESGGGLVRPGGSLRLSCAASGFTVSSKYMSWVRQAPGKGLEWVSVIYSGDITYYSNSVRGRFTISRDNSRNTLYLQMNSLRAEDTAVYYCAR

SEQ ID NO: 9249 - protein, 119 aa, Homo sapiens
EVRLVESGGGLVRPGGSLRLSCAASGFTVSSKYMSWVRQAPGKGLEWVSVIYSGDITYYSNSVRGRFTISRDNSRNTLYLQMNSLRAEDTAVYYCARGTDSAATRVDAWGQGTTVTVSS

SEQ ID NO: 9250 - protein, 97 aa, Homo sapiens
EVRLVQSGAEVRKPGATVKISCKVSGFSLTDSFLHWVQQAPGRGLEWMGVIDAEDGETIYAENVRGRVTITADTSTGTAYMEVSSLTSEDTAVYYCA

SEQ ID NO: 9251 - protein, 120 aa, Homo sapiens
EVRLVQSGAEVRKPGATVKISCKVSGFSLTDSFLHWVQQAPGRGLEWMGVIDAEDGETIYAENVRGRVTITADTSTGTAYMEVSSLTSEDTAVYYCARAISATGDWLDPWGQGTLVTVTS

SEQ ID NO: 9252 - protein, 98 aa, Homo sapiens
EVRLVQSGVEVKKPGESLKISCKASGYNFTNYWIGWVRHKPEKGLEWMGIVYPGDSDSKYNPSFQGQVAISADKSISTAYLQWSSMKASDSAMYYCVR

SEQ ID NO: 9253 - protein, 126 aa, Homo sapiens
EVRLVQSGVEVKKPGESLKISCKASGYNFTNYWIGWVRHKPEKGLEWMGIVYPGDSDSKYNPSFQGQVAISADKSISTAYLQWSSMKASDSAMYYCVRVDRYCAKSSCFGAWFEPWGQGTLVTVSS

SEQ ID NO: 9254 - protein, 7 aa, Homo sapiens
EVSERPS

SEQ ID NO: 9255 - protein, 7 aa, Homo sapiens
EVSGRFS

SEQ ID NO: 9256 - protein, 16 aa, Homo sapiens
EVSHSGSSKYNPSLKS

SEQ ID NO: 9257 - protein, 7 aa, Homo sapiens
EVSKLDS

SEQ ID NO: 9258 - protein, 7 aa, Homo sapiens
EVSKRAS

SEQ ID NO: 9259 - protein, 7 aa, Homo sapiens
EVSKRDS

SEQ ID NO: 9260 - protein, 7 aa, Homo sapiens
EVSKRFS

SEQ ID NO: 9261 - protein, 7 aa, Homo sapiens
EVSKRPS

SEQ ID NO: 9262 - protein, 7 aa, Homo sapiens
EVSKRTS

SEQ ID NO: 9263 - protein, 98 aa, Homo sapiens
EVSLVESGGGSAQPGGSLRLSCEASGFIFSHYWMTWVRQAPGKGLEWVANIKEDGSETLYLDSVRGRFSVFRDNTRNSLYLQMYSLRAEDTAVYYCAR

SEQ ID NO: 9264 - protein, 124 aa, Homo sapiens
EVSLVESGGGSAQPGGSLRLSCEASGFIFSHYWMTWVRQAPGKGLEWVANIKEDGSETLYLDSVRGRFSVFRDNTRNSLYLQMYSLRAEDTAVYYCARIFHFEQGGFYRHFDSWGQGTLVTVSS

SEQ ID NO: 9265 - protein, 7 aa, Homo sapiens
EVSNQFS

SEQ ID NO: 9266 - protein, 7 aa, Homo sapiens
EVSNRDS

SEQ ID NO: 9267 - protein, 7 aa, Homo sapiens
EVSNRFS

SEQ ID NO: 9268 - protein, 7 aa, Homo sapiens
EVSNRPS

SEQ ID NO: 9269 - protein, 7 aa, Homo sapiens
EVSNRVS

SEQ ID NO: 9270 - protein, 7 aa, Homo sapiens
EVSQRPS

SEQ ID NO: 9271 - protein, 7 aa, Homo sapiens
EVSRRPS

SEQ ID NO: 9272 - protein, 7 aa, Homo sapiens
EVSSRFS

SEQ ID NO: 9273 - protein, 7 aa, Homo sapiens
EVSSRVS

SEQ ID NO: 9274 - protein, 7 aa, Homo sapiens
EVSTRFS

SEQ ID NO: 9275 - protein, 7 aa, Homo sapiens
EVTKRPS

SEQ ID NO: 9276 - protein, 7 aa, Homo sapiens
EVTNRPL

SEQ ID NO: 9277 - protein, 7 aa, Homo sapiens
EVTNRPS

SEQ ID NO: 9278 - protein, 7 aa, Homo sapiens
EVTQRPS

SEQ ID NO: 9279 - protein, 7 aa, Homo sapiens
EVTYRPS

SEQ ID NO: 9280 - protein, 98 aa, Homo sapiens
EVVLLQSGGGLVQPGRSLRLSCAASGISVSRIAMSWVRQAPGKGLEWVSSLSVTGGSKYYADSVKGRFTISRDTSTNIVSLTMNDLRADDTAVYYCAK

SEQ ID NO: 9281 - protein, 123 aa, Homo sapiens
EVVLLQSGGGLVQPGRSLRLSCAASGISVSRIAMSWVRQAPGKGLEWVSSLSVTGGSKYYADSVKGRFTISRDTSTNIVSLTMNDLRADDTAVYYCAKDLGYRPFDWGYFDSWGQGTLVTVSS

SEQ ID NO: 9282 - protein, 96 aa, Homo sapiens
EVVLTQSPATLSLSPGERATLSCRANKNIDRYLVWYHQRPGQAPRLLIYDASNRATGIPDRFSGSGSGTDFSLTISSLEPEDFGVYYCQQRLYWPP

SEQ ID NO: 9283 - protein, 108 aa, Homo sapiens
EVVLTQSPATLSLSPGERATLSCRANKNIDRYLVWYHQRPGQAPRLLIYDASNRATGIPDRFSGSGSGTDFSLTISSLEPEDFGVYYCQQRLYWPPVTFGEGTRVDIK

SEQ ID NO: 9284 - protein, 96 aa, Homo sapiens
EVVLTQSPATLSLSPGESATLSCRASQSVSNYLAWYQQKPGLAPRLLIYDSSNRATGIPARFSGSGSGTDFTLTISSLEPEDFAVYYCQQRSNWPP

SEQ ID NO: 9285 - protein, 108 aa, Homo sapiens
EVVLTQSPATLSLSPGESATLSCRASQSVSNYLAWYQQKPGLAPRLLIYDSSNRATGIPARFSGSGSGTDFTLTISSLEPEDFAVYYCQQRSNWPPITFGQGTRLEIK

SEQ ID NO: 9286 - protein, 95 aa, Homo sapiens
EVVLTQSPDFQSVTPKEKVTITCRASQSIDTYLHWYQQKPDQSPKLLIKYASKSISGVPSRFSGSGFGTDFTLTINSLEAEDAAVYYCHQSNKLP

SEQ ID NO: 9287 - protein, 107 aa, Homo sapiens
EVVLTQSPDFQSVTPKEKVTITCRASQSIDTYLHWYQQKPDQSPKLLIKYASKSISGVPSRFSGSGFGTDFTLTINSLEAEDAAVYYCHQSNKLPPTFGQGTKVEIK

SEQ ID NO: 9288 - protein, 95 aa, Homo sapiens
EVVLTQSPGTLSLSPGDRATVSCRASQSVARNSIAWFQQKPGQAPRLLIYSASTRAAGVPDRFSGSGSGTDFTLSISRLEPEDFAVYFCQQYGSA

SEQ ID NO: 9289 - protein, 108 aa, Homo sapiens
EVVLTQSPGTLSLSPGDRATVSCRASQSVARNSIAWFQQKPGQAPRLLIYSASTRAAGVPDRFSGSGSGTDFTLSISRLEPEDFAVYFCQQYGSAQYTFGQGTKVDIK

SEQ ID NO: 9290 - protein, 96 aa, Homo sapiens
EVVLTQSPGTLSLSPGEGATLSCRASQGLTNKYIAWYQQRPGQAPRLLIYDASNRATGIPDRFSGSGSGTDFTLTISSLEPEDFAVYYCQQYDSSP

SEQ ID NO: 9291 - protein, 108 aa, Homo sapiens
EVVLTQSPGTLSLSPGEGATLSCRASQGLTNKYIAWYQQRPGQAPRLLIYDASNRATGIPDRFSGSGSGTDFTLTISSLEPEDFAVYYCQQYDSSPRTFGQGTKVEIK

SEQ ID NO: 9292 - protein, 94 aa, Homo sapiens
EVVLTQSPGTLSLSPGEGATLSCRASQSVSSSLAWYQQKPGLAPRLLIFGASTRATGIPDRFSGSGSGTDFTLRISRLEPEDFAVYYCQQYGRS

SEQ ID NO: 9293 - protein, 106 aa, Homo sapiens
EVVLTQSPGTLSLSPGEGATLSCRASQSVSSSLAWYQQKPGLAPRLLIFGASTRATGIPDRFSGSGSGTDFTLRISRLEPEDFAVYYCQQYGRSLSFGGGTKVEIK

SEQ ID NO: 9294 - protein, 96 aa, Homo sapiens
EVVLTQSPGTLSLSPGERAPLSCRASQTISGTYLAWYQQKPGLAPRLLIYDASTRATGIPDRFSGSGSGTDFTLTISRLEPEDFAVYYCQQYGSSP

SEQ ID NO: 9295 - protein, 108 aa, Homo sapiens
EVVLTQSPGTLSLSPGERAPLSCRASQTISGTYLAWYQQKPGLAPRLLIYDASTRATGIPDRFSGSGSGTDFTLTISRLEPEDFAVYYCQQYGSSPITFGQGTRLEIK

SEQ ID NO: 9296 - protein, 96 aa, Homo sapiens
EVVLTQSPGTLSLSPGERATLSCRASQSVNSRYLAWYQQKPGQAPRLLMYGASNRATGIPDRFSGSASGTDFTLTISRLEPEDYAVYYCQQSGRSP

SEQ ID NO: 9297 - protein, 108 aa, Homo sapiens
EVVLTQSPGTLSLSPGERATLSCRASQSVNSRYLAWYQQKPGQAPRLLMYGASNRATGIPDRFSGSASGTDFTLTISRLEPEDYAVYYCQQSGRSPYTFGQGTKVDIK

SEQ ID NO: 9298 - protein, 96 aa, Homo sapiens
EVVLTQSPGTLSLSPGERATLSCRASQSVRNNYLAWYQQKSGQAPRLLIYGAASRATGIPDRFGGSGSGTDFTLTISRLEPEDFAVYYCQHYGGSP

SEQ ID NO: 9299 - protein, 109 aa, Homo sapiens
EVVLTQSPGTLSLSPGERATLSCRASQSVRNNYLAWYQQKSGQAPRLLIYGAASRATGIPDRFGGSGSGTDFTLTISRLEPEDFAVYYCQHYGGSPRITFGQGTRLEIK

SEQ ID NO: 9300 - protein, 96 aa, Homo sapiens
EVVLTQSPGTLSLSPGERATLSCRASQSVSSSYLAWYQHKPGQAPRLLIYDASRRATGIPDRFSGSGSGTDFTLTVSRLEPEDFAVYYCQQYDSSP

SEQ ID NO: 9301 - protein, 108 aa, Homo sapiens
EVVLTQSPGTLSLSPGERATLSCRASQSVSSSYLAWYQHKPGQAPRLLIYDASRRATGIPDRFSGSGSGTDFTLTVSRLEPEDFAVYYCQQYDSSPFTFGPGTKVDFK

SEQ ID NO: 9302 - protein, 96 aa, Homo sapiens
EVVMTQSPASLSVSPGESATLSCRASQSVSTDLAWYQQKPGQAPRLLIYGASTRATGIPARFSGSGSGTEFTLTISRLQSEDFAVYYCQQYNNWPP

SEQ ID NO: 9303 - protein, 108 aa, Homo sapiens
EVVMTQSPASLSVSPGESATLSCRASQSVSTDLAWYQQKPGQAPRLLIYGASTRATGIPARFSGSGSGTEFTLTISRLQSEDFAVYYCQQYNNWPPITFGGGTTVEIK

SEQ ID NO: 9304 - protein, 96 aa, Homo sapiens
EVVMTQSPATLSASPGERATLSCRSSQSISNNLAWYQQKPGQAPRLLIYGASTRATGTPARFSGSGSGTEFTLTISSLQSEDFAVYYCQQYTFWPP

SEQ ID NO: 9305 - protein, 108 aa, Homo sapiens
EVVMTQSPATLSASPGERATLSCRSSQSISNNLAWYQQKPGQAPRLLIYGASTRATGTPARFSGSGSGTEFTLTISSLQSEDFAVYYCQQYTFWPPWTFGQGTKVDIK

SEQ ID NO: 9306 - protein, 96 aa, Homo sapiens
EVVMTQSPATLSLSPGERATLSCRATQSVNSDLAWYQQKPGQAPRLLIYGASSRATGIPDRFSGSGSGTDFTLTISSLEPEDFAVYYCQQYNNWPP

SEQ ID NO: 9307 - protein, 108 aa, Homo sapiens
EVVMTQSPATLSLSPGERATLSCRATQSVNSDLAWYQQKPGQAPRLLIYGASSRATGIPDRFSGSGSGTDFTLTISSLEPEDFAVYYCQQYNNWPPKTFGQGTKVEIK

SEQ ID NO: 9308 - protein, 96 aa, Homo sapiens
EVVMTQSPATLSVSPGEGATLSCRASQSVSTSVAWYQRKPGQAPRLLIYGASTRATGIPARFSGSGSGTEFTLTISSLQSEDFAVYYCQQYNNWPP

SEQ ID NO: 9309 - protein, 108 aa, Homo sapiens
EVVMTQSPATLSVSPGEGATLSCRASQSVSTSVAWYQRKPGQAPRLLIYGASTRATGIPARFSGSGSGTEFTLTISSLQSEDFAVYYCQQYNNWPPLTFGGGTKLEIK

SEQ ID NO: 9310 - protein, 96 aa, Homo sapiens
EVVMTQSPATLSVSPGERATLSCRASQSISNDLAWFQQKPGQPPRLLIYGASTRATGIPARFSGSGSGTEFTLTISSLQSEDFAVYYCQQYNNWPP

SEQ ID NO: 9311 - protein, 108 aa, Homo sapiens
EVVMTQSPATLSVSPGERATLSCRASQSISNDLAWFQQKPGQPPRLLIYGASTRATGIPARFSGSGSGTEFTLTISSLQSEDFAVYYCQQYNNWPPATFGPGTKVDIK

SEQ ID NO: 9312 - protein, 96 aa, Homo sapiens
EVVMTQSPATLSVSPGERATLSCRASQSISSDLAWYQQKPGQAPRLLIYGASTRATGVPARFSGSGSGTEFTLTISSLQSEDFAVYYCQQYNNWPP

SEQ ID NO: 9313 - protein, 108 aa, Homo sapiens
EVVMTQSPATLSVSPGERATLSCRASQSISSDLAWYQQKPGQAPRLLIYGASTRATGVPARFSGSGSGTEFTLTISSLQSEDFAVYYCQQYNNWPPLTFGGGTKVEIK

SEQ ID NO: 9314 - protein, 96 aa, Homo sapiens
EVVMTQSPATLSVSPGERATLSCRASQSVGSNLAWYQQKPGQAPRLLLYGASTRATGIPARFSGSGSGTEFTLTISSLQSGDFAVYYCQQYTYWPP

SEQ ID NO: 9315 - protein, 108 aa, Homo sapiens
EVVMTQSPATLSVSPGERATLSCRASQSVGSNLAWYQQKPGQAPRLLLYGASTRATGIPARFSGSGSGTEFTLTISSLQSGDFAVYYCQQYTYWPPWTFGQGTKVEIK

SEQ ID NO: 9316 - protein, 95 aa, Homo sapiens
EVVMTQSPATLSVSPGERATLSCRASQSVNSNLAWYQQKPGQAPRLLIYGASTRATGIPARFSGSGSGTEFTLTISSMQSEDFAVYYCQQYNNWP

SEQ ID NO: 9317 - protein, 106 aa, Homo sapiens
EVVMTQSPATLSVSPGERATLSCRASQSVNSNLAWYQQKPGQAPRLLIYGASTRATGIPARFSGSGSGTEFTLTISSMQSEDFAVYYCQQYNNWPWTLGQGTKGEV

SEQ ID NO: 9318 - protein, 96 aa, Homo sapiens
EVVMTQSPATLSVSPGERATLSCRASQSVSSNLAWYQQKPGQAPRLLIYGASARATGIPARFSGSGSGTEFTLTISSLQSEDFAVYYCQQYSFWPP

SEQ ID NO: 9319 - protein, 107 aa, Homo sapiens
EVVMTQSPATLSVSPGERATLSCRASQSVSSNLAWYQQKPGQAPRLLIYGASARATGIPARFSGSGSGTEFTLTISSLQSEDFAVYYCQQYSFWPPWTFGQGTKVEI

SEQ ID NO: 9320 - protein, 96 aa, Homo sapiens
EVVMTQSPATLSVSPGERATLSCRASQSVSSNLAWYQQKPGQAPRLLIYGASARATGIPARFSGSGSGTEFTLTISSLQSEDFAVYYCQQYTFWPP

SEQ ID NO: 9321 - protein, 107 aa, Homo sapiens
EVVMTQSPATLSVSPGERATLSCRASQSVSSNLAWYQQKPGQAPRLLIYGASARATGIPARFSGSGSGTEFTLTISSLQSEDFAVYYCQQYTFWPPWTFGQGTKVEI

SEQ ID NO: 9322 - protein, 96 aa, Homo sapiens
EVVMTQSPATLSVSPGERATLSCRASQSVSSNLAWYQQKPGQAPRLLIYGASSRATGIPARFSGSGSGTEFTLTISSMQSEDFAVYYCQQYNNWPP

SEQ ID NO: 9323 - protein, 108 aa, Homo sapiens
EVVMTQSPATLSVSPGERATLSCRASQSVSSNLAWYQQKPGQAPRLLIYGASSRATGIPARFSGSGSGTEFTLTISSMQSEDFAVYYCQQYNNWPPLTFGGGTKVEIK

SEQ ID NO: 9324 - protein, 96 aa, Homo sapiens
EVVMTQSPATLSVSPGERATLSCRASQSVSSNLAWYQQKPGQAPRLLIYGASTRATGIPARFSGSGSGTEFILTISSLQSEDFAVYYCQQYNNWPP

SEQ ID NO: 9325 - protein, 107 aa, Homo sapiens
EVVMTQSPATLSVSPGERATLSCRASQSVSSNLAWYQQKPGQAPRLLIYGASTRATGIPARFSGSGSGTEFILTISSLQSEDFAVYYCQQYNNWPPYTFGQGTKLEI

SEQ ID NO: 9326 - protein, 95 aa, Homo sapiens
EVVMTQSPATLSVSPGERATLSCRASQSVSSNLVWYQQRPGQAPRLLIYGASTRATGIPARFSGSGSGTEFTLTISSMQSEDFAVYYCQQYDTWS

SEQ ID NO: 9327 - protein, 106 aa, Homo sapiens
EVVMTQSPATLSVSPGERATLSCRASQSVSSNLVWYQQRPGQAPRLLIYGASTRATGIPARFSGSGSGTEFTLTISSMQSEDFAVYYCQQYDTWSSFGQGTKVEIK

SEQ ID NO: 9328 - protein, 96 aa, Homo sapiens
EVVMTQSPATLSVSPGERATLSCRASQSVTSDLAWYQQKPGQAPRLLIYGASTRATGIPARFSGSGSGTEFTLTISSLQSEDFAVYYCQQYNNWPP

SEQ ID NO: 9329 - protein, 108 aa, Homo sapiens
EVVMTQSPATLSVSPGERATLSCRASQSVTSDLAWYQQKPGQAPRLLIYGASTRATGIPARFSGSGSGTEFTLTISSLQSEDFAVYYCQQYNNWPPLTFGGGTKVEIK

SEQ ID NO: 9330 - protein, 95 aa, Homo sapiens
EVVMTQSPATLSVSPGERATLSCRATQNVRFSLAWYQQRLGQAPRLLIYGASTRATGIPARFSGSGSGTEFTLTISSLQSEDFAVYYCQQYDNWP

SEQ ID NO: 9331 - protein, 106 aa, Homo sapiens
EVVMTQSPATLSVSPGERATLSCRATQNVRFSLAWYQQRLGQAPRLLIYGASTRATGIPARFSGSGSGTEFTLTISSLQSEDFAVYYCQQYDNWPRTFGQGTKVDI

SEQ ID NO: 9332 - protein, 96 aa, Homo sapiens
EVVMTQSPATLSVSPGQRATLSCRASQSVTRNLAWYQQKPGQAPRLLIYGASTRATGIPARFSGSGSGTEFTLTISSMQSEDFAVYYCQQYNNWPP

SEQ ID NO: 9333 - protein, 108 aa, Homo sapiens
EVVMTQSPATLSVSPGQRATLSCRASQSVTRNLAWYQQKPGQAPRLLIYGASTRATGIPARFSGSGSGTEFTLTISSMQSEDFAVYYCQQYNNWPPVTFGGGTKVEIK

SEQ ID NO: 9334 - protein, 96 aa, Homo sapiens
EVVMTQSPATVSVSPGGRATLSCRASQSVSSSLAWYQQKPGQPPRLLIFDASRRVTGIPDRFSGSGSGTEFTLTITSLQSEDFAVYYCQHYTNWPP

SEQ ID NO: 9335 - protein, 108 aa, Homo sapiens
EVVMTQSPATVSVSPGGRATLSCRASQSVSSSLAWYQQKPGQPPRLLIFDASRRVTGIPDRFSGSGSGTEFTLTITSLQSEDFAVYYCQHYTNWPPWTFGQGTKVEIK

SEQ ID NO: 9336 - protein, 97 aa, Homo sapiens
EVYLVESGGGLVQPGGSLRLSCVASGFMFSSHWMHWVRQAPGKGLMWVSRINNDGSLTTNADSVKGRITISRDNAKNMVYLQMRSLRADDTAVYYCV

SEQ ID NO: 9337 - protein, 114 aa, Homo sapiens
EVYLVESGGGLVQPGGSLRLSCVASGFMFSSHWMHWVRQAPGKGLMWVSRINNDGSLTTNADSVKGRITISRDNAKNMVYLQMRSLRADDTAVYYCVRGLGDYWGQGTLVTVSS

SEQ ID NO: 9338 - protein, 16 aa, Homo sapiens
EWFYYGSGSKSYGMDV

SEQ ID NO: 9339 - protein, 5 aa, Homo sapiens
EYAMQ

SEQ ID NO: 9340 - protein, 18 aa, Homo sapiens
EYAYGSGSLYNRADAFDI

SEQ ID NO: 9341 - protein, 18 aa, Homo sapiens
EYAYGSGSLYNRADAFDI

SEQ ID NO: 9342 - protein, 18 aa, Homo sapiens
EYAYGSGSLYNRADAFDV

SEQ ID NO: 9343 - protein, 16 aa, Homo sapiens
EYMLGPSIGPFDAFDI

SEQ ID NO: 9344 - protein, 16 aa, Homo sapiens
EYMYGPSIGPFDAFDI

SEQ ID NO: 9345 - protein, 14 aa, Homo sapiens
EYSTYVPVTGTFDY

SEQ ID NO: 9346 - protein, 12 aa, Homo sapiens
EYSYESSGYYAF

SEQ ID NO: 9347 - protein, 5 aa, Homo sapiens
EYWMS

SEQ ID NO: 9348 - protein, 15 aa, Homo sapiens
FAFCRSTNCPESFDY

SEQ ID NO: 9349 - protein, 15 aa, Homo sapiens
FAFCRSYDCPESFDY

SEQ ID NO: 9350 - protein, 13 aa, Homo sapiens
FAGSLRANWFINF

SEQ ID NO: 9351 - protein, 6 aa, Homo sapiens
FANLGN

SEQ ID NO: 9352 - protein, 7 aa, Homo sapiens
FASNLQS

SEQ ID NO: 9353 - protein, 15 aa, Homo sapiens
FAYCRSTNCPEAFDF

SEQ ID NO: 9354 - protein, 15 aa, Homo sapiens
FAYCRSTNCPEAFDY

SEQ ID NO: 9355 - protein, 15 aa, Homo sapiens
FAYCRSTNCPESFDY

SEQ ID NO: 9356 - protein, 10 aa, Homo sapiens
FDYGGDGGDS

SEQ ID NO: 9357 - protein, 11 aa, Homo sapiens
FELYSGYFMRF

SEQ ID NO: 9358 - protein, 4 aa, Homo sapiens
FFDI

SEQ ID NO: 9359 - protein, 11 aa, Homo sapiens
FGDKLGDKYAC

SEQ ID NO: 9360 - protein, 14 aa, Homo sapiens
FGNTSDVVDYNSVT

SEQ ID NO: 9361 - protein, 7 aa, Homo sapiens
FGSNGAP

SEQ ID NO: 9362 - protein, 7 aa, Homo sapiens
FGSNGAP

SEQ ID NO: 9363 - protein, 7 aa, Homo sapiens
FGSNGAS

SEQ ID NO: 9364 - protein, 6 aa, Homo sapiens
FGSRGY

SEQ ID NO: 9365 - protein, 17 aa, Homo sapiens
FGSTSNIGSRDGSRPVN

SEQ ID NO: 9366 - protein, 17 aa, Homo sapiens
FIFERLYDYGSGGGFDY

SEQ ID NO: 9367 - protein, 16 aa, Homo sapiens
FIHISGNTNYNPSLKG

SEQ ID NO: 9368 - protein, 17 aa, Homo sapiens
FILYDGSNEHYADSVKG

SEQ ID NO: 9369 - protein, 17 aa, Homo sapiens
FIPYDGSNKFYADSVKG

SEQ ID NO: 9370 - protein, 17 aa, Homo sapiens
FIRFDGSDKNYADSVKG

SEQ ID NO: 9371 - protein, 17 aa, Homo sapiens
FIRFDGSQKSFADSVKG

SEQ ID NO: 9372 - protein, 19 aa, Homo sapiens
FIRREAYGATTEYAASVKG

SEQ ID NO: 9373 - protein, 19 aa, Homo sapiens
FIRRKAYGGTTEYAASVKG

SEQ ID NO: 9374 - protein, 19 aa, Homo sapiens
FIRRKTHGGTTEYAASVKG

SEQ ID NO: 9375 - protein, 19 aa, Homo sapiens
FIRRRANDGTTEYAASVKG

SEQ ID NO: 9376 - protein, 17 aa, Homo sapiens
FIRSDESDKYYAASVKG

SEQ ID NO: 9377 - protein, 19 aa, Homo sapiens
FIRSKAQEGTTQRAASVKD

SEQ ID NO: 9378 - protein, 19 aa, Homo sapiens
FIRSKASGGTTEYAASVKG

SEQ ID NO: 9379 - protein, 19 aa, Homo sapiens
FIRSKAYGGTTEYAASVKG

SEQ ID NO: 9380 - protein, 19 aa, Homo sapiens
FIRSKAYGGTTEYAASVNG

SEQ ID NO: 9381 - protein, 19 aa, Homo sapiens
FIRSKSYGGTAEYAASVQG

SEQ ID NO: 9382 - protein, 17 aa, Homo sapiens
FIRYDGLDRDFADSVKG

SEQ ID NO: 9383 - protein, 17 aa, Homo sapiens
FIRYDGNNKYYAASVKG

SEQ ID NO: 9384 - protein, 17 aa, Homo sapiens
FIRYDGRDIYYADSVKG

SEQ ID NO: 9385 - protein, 17 aa, Homo sapiens
FIRYDGRKKDYADSVKG

SEQ ID NO: 9386 - protein, 17 aa, Homo sapiens
FIRYDGSDKYYADSVKG

SEQ ID NO: 9387 - protein, 17 aa, Homo sapiens
FIRYDGSKNYYADSVKG

SEQ ID NO: 9388 - protein, 17 aa, Homo sapiens
FIRYDGSNKYYADSVKG

SEQ ID NO: 9389 - protein, 17 aa, Homo sapiens
FIRYDGSNKYYGDSVKG

SEQ ID NO: 9390 - protein, 17 aa, Homo sapiens
FIRYDGSNQYYADSIKG

SEQ ID NO: 9391 - protein, 17 aa, Homo sapiens
FIRYDGSYKSYADSVKG

SEQ ID NO: 9392 - protein, 17 aa, Homo sapiens
FISASALSKYYADSVKG

SEQ ID NO: 9393 - protein, 17 aa, Homo sapiens
FISATGGSTYYVDSVKG

SEQ ID NO: 9394 - protein, 17 aa, Homo sapiens
FISATGLSTYYADSVKG

SEQ ID NO: 9395 - protein, 17 aa, Homo sapiens
FISFDGGSKYYADSVKG

SEQ ID NO: 9396 - protein, 17 aa, Homo sapiens
FISGSGFSTYYADSVKG

SEQ ID NO: 9397 - protein, 17 aa, Homo sapiens
FISGSGGSTYYADSVKG

SEQ ID NO: 9398 - protein, 17 aa, Homo sapiens
FISGSGISTYYADSVKG

SEQ ID NO: 9399 - protein, 17 aa, Homo sapiens
FISGSGLSTYYADSVKG

SEQ ID NO: 9400 - protein, 17 aa, Homo sapiens
FISHHESDIYYAASVKG

SEQ ID NO: 9401 - protein, 17 aa, Homo sapiens
FISHHGSDKYYAASVKG

SEQ ID NO: 9402 - protein, 17 aa, Homo sapiens
FISLDGSKKWYTDSVKG

SEQ ID NO: 9403 - protein, 17 aa, Homo sapiens
FISNSGLSTYYADSVKG

SEQ ID NO: 9404 - protein, 17 aa, Homo sapiens
FISPTSLSTYYADSVKG

SEQ ID NO: 9405 - protein, 17 aa, Homo sapiens
FISSSGITSYYADSVKG

SEQ ID NO: 9406 - protein, 17 aa, Homo sapiens
FISYDGSKEYYAESVKG

SEQ ID NO: 9407 - protein, 17 aa, Homo sapiens
FISYDGSKTYHADSVKG

SEQ ID NO: 9408 - protein, 17 aa, Homo sapiens
FISYDGSNKYYADSVKG

SEQ ID NO: 9409 - protein, 17 aa, Homo sapiens
FISYDGTKNYYVDSVRG

SEQ ID NO: 9410 - protein, 17 aa, Homo sapiens
FIWHDGNKIDYIASVQG

SEQ ID NO: 9411 - protein, 17 aa, Homo sapiens
FIWYDGNNKYYTDSLKG

SEQ ID NO: 9412 - protein, 15 aa, Homo sapiens
FIYHSGSYYNPSLKS

SEQ ID NO: 9413 - protein, 16 aa, Homo sapiens
FIYWDDDKRYSPSLKS

SEQ ID NO: 9414 - protein, 16 aa, Homo sapiens
FIYYSGSTYYNPSLKS

SEQ ID NO: 9415 - protein, 17 aa, Homo sapiens
FLSNTASAIYYADSLKG

SEQ ID NO: 9416 - protein, 9 aa, Homo sapiens
FLSYSDFWV

SEQ ID NO: 9417 - protein, 97 aa, Homo sapiens
FMLTQPHSVSESLGKTITISCTCSSGSIASNYVQWFQQRPGSSPTTVIYEDDHRPSGVPDRFSGSIDRSSNSASLTISGLKTEDEADYYCQSYDGRN

SEQ ID NO: 9418 - protein, 111 aa, Homo sapiens
FMLTQPHSVSESLGKTITISCTCSSGSIASNYVQWFQQRPGSSPTTVIYEDDHRPSGVPDRFSGSIDRSSNSASLTISGLKTEDEADYYCQSYDGRNQDVVFGGGTKLTVL

SEQ ID NO: 9419 - protein, 19 aa, Homo sapiens
FMRSKAYGGTIEYAASVKG

SEQ ID NO: 9420 - protein, 17 aa, Homo sapiens
FMRTDDTDKYYADSVKG

SEQ ID NO: 9421 - protein, 14 aa, Homo sapiens
FMSSSDYYHYYMDV

SEQ ID NO: 9422 - protein, 14 aa, Homo sapiens
FQSRSIPVAGNFDY

SEQ ID NO: 9423 - protein, 14 aa, Homo sapiens
FQSTYIPVAGNFDY

SEQ ID NO: 9424 - protein, 14 aa, Homo sapiens
FREYADHYVGRFDF

SEQ ID NO: 9425 - protein, 19 aa, Homo sapiens
FRLKYDWLPNGPYYFYMDV

SEQ ID NO: 9426 - protein, 11 aa, Homo sapiens
FSTDSSGDHRV

SEQ ID NO: 9427 - protein, 10 aa, Homo sapiens
FSYAGSSTWV

SEQ ID NO: 9428 - protein, 96 aa, Homo sapiens
FVLPQPPSASGTPGQRVTISCSGSSSNMGKNNVNWYQQVPGTAPKLLIHSDNQRPSGVPDRFSGSKSGTSASLAISGLQSEDEADYYCAVWDDSLS

SEQ ID NO: 9429 - protein, 109 aa, Homo sapiens
FVLPQPPSASGTPGQRVTISCSGSSSNMGKNNVNWYQQVPGTAPKLLIHSDNQRPSGVPDRFSGSKSGTSASLAISGLQSEDEADYYCAVWDDSLSVWVFGGGTKLTVL

SEQ ID NO: 9430 - protein, 98 aa, Homo sapiens
FVMTQSPLSLPVTLGQPASICCRSSQSLVHKDGNTYLNWFQQRPGQSPRRLIYKVSNRDSGVPDRFSGSGSGTDFTLKISRVEAEDVAVYYCMQGTHW

SEQ ID NO: 9431 - protein, 112 aa, Homo sapiens
FVMTQSPLSLPVTLGQPASICCRSSQSLVHKDGNTYLNWFQQRPGQSPRRLIYKVSNRDSGVPDRFSGSGSGTDFTLKISRVEAEDVAVYYCMQGTHWNMYSFGQGTKLEIK

SEQ ID NO: 9432 - protein, 98 aa, Homo sapiens
FVMTQSPLSLPVTLGQPASISCRSSRSLVHSDGNTYLNWFQQKPGQSPRRLIYQVSNRDSGVPDRFSGSGSGTDFTLKISRVEAEDVAVYYCMQGTHW

SEQ ID NO: 9433 - protein, 112 aa, Homo sapiens
FVMTQSPLSLPVTLGQPASISCRSSRSLVHSDGNTYLNWFQQKPGQSPRRLIYQVSNRDSGVPDRFSGSGSGTDFTLKISRVEAEDVAVYYCMQGTHWNMYSFGQGTKLEIK

SEQ ID NO: 9434 - protein, 17 aa, Homo sapiens
FVRYDGSDEYYADSVKG

SEQ ID NO: 9435 - protein, 100 aa, Homo sapiens
FVVTQSPDSLAVSLGERATINCKSSQSVFWDSNKKNYLAWYQQKPGHPPKLLINWASARASGVPDRFRGSGSATDFTLTITSLQAEDVAVYYCHQYYSNP

SEQ ID NO: 9436 - protein, 111 aa, Homo sapiens
FVVTQSPDSLAVSLGERATINCKSSQSVFWDSNKKNYLAWYQQKPGHPPKLLINWASARASGVPDRFRGSGSATDFTLTITSLQAEDVAVYYCHQYYSNPQTFGQGTKLEI

SEQ ID NO: 9437 - protein, 16 aa, Homo sapiens
FVYYTGLTDYSPSLKS

SEQ ID NO: 9438 - protein, 5 aa, Homo sapiens
FYAIN

SEQ ID NO: 9439 - protein, 6 aa, Homo sapiens
FYPDDY

SEQ ID NO: 9440 - protein, 6 aa, Homo sapiens
FYPGDY

SEQ ID NO: 9441 - protein, 7 aa, Homo sapiens
GAASRAT

SEQ ID NO: 9442 - protein, 7 aa, Homo sapiens
GAATRAT

SEQ ID NO: 9443 - protein, 13 aa, Homo sapiens
GADHGSGSDFVVV

SEQ ID NO: 9444 - protein, 13 aa, Homo sapiens
GADHGSGSNFLVV

SEQ ID NO: 9445 - protein, 13 aa, Homo sapiens
GADHGSGSNFVVV

SEQ ID NO: 9446 - protein, 13 aa, Homo sapiens
GADHGTGINFVYV

SEQ ID NO: 9447 - protein, 13 aa, Homo sapiens
GADHVTGRVFVYV

SEQ ID NO: 9448 - protein, 11 aa, Homo sapiens
GADNIVSRNVH

SEQ ID NO: 9449 - protein, 13 aa, Homo sapiens
GADSYDDSGYWEF

SEQ ID NO: 9450 - protein, 13 aa, Homo sapiens
GADYGSGSNFVVV

SEQ ID NO: 9451 - protein, 7 aa, Homo sapiens
GAFTRAT

SEQ ID NO: 9452 - protein, 10 aa, Homo sapiens
GAGSGSYSDY

SEQ ID NO: 9453 - protein, 16 aa, Homo sapiens
GAGTVNYGDYEDAFDI

SEQ ID NO: 9454 - protein, 12 aa, Homo sapiens
GAGYHLSSQTDY

SEQ ID NO: 9455 - protein, 11 aa, Homo sapiens
GAGYVASWLGF

SEQ ID NO: 9456 - protein, 11 aa, Homo sapiens
GAGYVASWLGS

SEQ ID NO: 9457 - protein, 10 aa, Homo sapiens
GAIVVVPVNY

SEQ ID NO: 9458 - protein, 16 aa, Homo sapiens
GAIWEDLSGYYTHFDY

SEQ ID NO: 9459 - protein, 12 aa, Homo sapiens
GALENTYSDWSH

SEQ ID NO: 9460 - protein, 14 aa, Homo sapiens
GAMVRGHFGEVFDS

SEQ ID NO: 9461 - protein, 7 aa, Homo sapiens
GANTRAT

SEQ ID NO: 9462 - protein, 15 aa, Homo sapiens
GAQAGYSSFFPPTTF

SEQ ID NO: 9463 - protein, 18 aa, Homo sapiens
GARFLEWLLYFGPGAFDI

SEQ ID NO: 9464 - protein, 7 aa, Homo sapiens
GASARAT

SEQ ID NO: 9465 - protein, 15 aa, Homo sapiens
GASFAYFHDNSPFDS

SEQ ID NO: 9466 - protein, 15 aa, Homo sapiens
GASFAYFHDNSPLDS

SEQ ID NO: 9467 - protein, 15 aa, Homo sapiens
GASFAYFQDNSPLDS

SEQ ID NO: 9468 - protein, 15 aa, Homo sapiens
GASFAYFVDQSPLDS

SEQ ID NO: 9469 - protein, 7 aa, Homo sapiens
GASGRAP

SEQ ID NO: 9470 - protein, 7 aa, Homo sapiens
GASILQS

SEQ ID NO: 9471 - protein, 7 aa, Homo sapiens
GASIRAA

SEQ ID NO: 9472 - protein, 7 aa, Homo sapiens
GASIRAT

SEQ ID NO: 9473 - protein, 16 aa, Homo sapiens
GASKEESAGGYRPLHY

SEQ ID NO: 9474 - protein, 7 aa, Homo sapiens
GASKRAS

SEQ ID NO: 9475 - protein, 7 aa, Homo sapiens
GASNLES

SEQ ID NO: 9476 - protein, 7 aa, Homo sapiens
GASNLET

SEQ ID NO: 9477 - protein, 7 aa, Homo sapiens
GASNLQS

SEQ ID NO: 9478 - protein, 7 aa, Homo sapiens
GASNRAP

SEQ ID NO: 9479 - protein, 7 aa, Homo sapiens
GASNRAS

SEQ ID NO: 9480 - protein, 7 aa, Homo sapiens
GASNRAT

SEQ ID NO: 9481 - protein, 7 aa, Homo sapiens
GASNRDS

SEQ ID NO: 9482 - protein, 12 aa, Homo sapiens
GASQPVSSNNLA

SEQ ID NO: 9483 - protein, 11 aa, Homo sapiens
GASQSITTSLA

SEQ ID NO: 9484 - protein, 12 aa, Homo sapiens
GASQSVSGNYLA

SEQ ID NO: 9485 - protein, 12 aa, Homo sapiens
GASQSVSSNYLA

SEQ ID NO: 9486 - protein, 12 aa, Homo sapiens
GASQSVSSSYLA

SEQ ID NO: 9487 - protein, 7 aa, Homo sapiens
GASRRAA

SEQ ID NO: 9488 - protein, 7 aa, Homo sapiens
GASRRAT

SEQ ID NO: 9489 - protein, 7 aa, Homo sapiens
GASSLES

SEQ ID NO: 9490 - protein, 7 aa, Homo sapiens
GASSLQS

SEQ ID NO: 9491 - protein, 7 aa, Homo sapiens
GASSRAA

SEQ ID NO: 9492 - protein, 7 aa, Homo sapiens
GASSRAP

SEQ ID NO: 9493 - protein, 7 aa, Homo sapiens
GASSRAS

SEQ ID NO: 9494 - protein, 7 aa, Homo sapiens
GASSRAT

SEQ ID NO: 9495 - protein, 7 aa, Homo sapiens
GASTGAT

SEQ ID NO: 9496 - protein, 7 aa, Homo sapiens
GASTLDS

SEQ ID NO: 9497 - protein, 7 aa, Homo sapiens
GASTLES

SEQ ID NO: 9498 - protein, 7 aa, Homo sapiens
GASTLQS

SEQ ID NO: 9499 - protein, 7 aa, Homo sapiens
GASTRAA

SEQ ID NO: 9500 - protein, 7 aa, Homo sapiens
GASTRAI

SEQ ID NO: 9501 - protein, 7 aa, Homo sapiens
GASTRAP

SEQ ID NO: 9502 - protein, 7 aa, Homo sapiens
GASTRAS

SEQ ID NO: 9503 - protein, 7 aa, Homo sapiens
GASTRAT

SEQ ID NO: 9504 - protein, 7 aa, Homo sapiens
GASTRVI

SEQ ID NO: 9505 - protein, 7 aa, Homo sapiens
GATSRAT

SEQ ID NO: 9506 - protein, 7 aa, Homo sapiens
GATTLQS

SEQ ID NO: 9507 - protein, 7 aa, Homo sapiens
GATTRAT

SEQ ID NO: 9508 - protein, 12 aa, Homo sapiens
GATYHFTSPIDY

SEQ ID NO: 9509 - protein, 9 aa, Homo sapiens
GAWDSDLMI

SEQ ID NO: 9510 - protein, 12 aa, Homo sapiens
GAYSGYEILIDF

SEQ ID NO: 9511 - protein, 7 aa, Homo sapiens
GAYTRVI

SEQ ID NO: 9512 - protein, 5 aa, Homo sapiens
GCAMH

SEQ ID NO: 9513 - protein, 16 aa, Homo sapiens
GCICSLDSTGYRPLDH

SEQ ID NO: 9514 - protein, 16 aa, Homo sapiens
GCICSLDTTGYRPLDY

SEQ ID NO: 9515 - protein, 16 aa, Homo sapiens
GCLCSLDSTGYRPLDY

SEQ ID NO: 9516 - protein, 17 aa, Homo sapiens
GDCSNTNCYVHYYYMDV

SEQ ID NO: 9517 - protein, 12 aa, Homo sapiens
GDDYSEWRPSTF

SEQ ID NO: 9518 - protein, 13 aa, Homo sapiens
GDGDFHEGNYFDL

SEQ ID NO: 9519 - protein, 13 aa, Homo sapiens
GDGDFHPGDWFDP

SEQ ID NO: 9520 - protein, 13 aa, Homo sapiens
GDGGITPILYFDY

SEQ ID NO: 9521 - protein, 14 aa, Homo sapiens
GDGYHLLQSNPALS

SEQ ID NO: 9522 - protein, 14 aa, Homo sapiens
GDGYHVLQSNPALS

SEQ ID NO: 9523 - protein, 13 aa, Homo sapiens
GDGYKPTMTPIAY

SEQ ID NO: 9524 - protein, 13 aa, Homo sapiens
GDGYKPTMTQIAY

SEQ ID NO: 9525 - protein, 14 aa, Homo sapiens
GDGYNLLQSNPALS

SEQ ID NO: 9526 - protein, 11 aa, Homo sapiens
GDGYQPDYFQH

SEQ ID NO: 9527 - protein, 13 aa, Homo sapiens
GDGYRPTMTPLAD

SEQ ID NO: 9528 - protein, 13 aa, Homo sapiens
GDGYRPTMTQIAY

SEQ ID NO: 9529 - protein, 10 aa, Homo sapiens
GDILTGYYFY

SEQ ID NO: 9530 - protein, 11 aa, Homo sapiens
GDITGWLLEAT

SEQ ID NO: 9531 - protein, 14 aa, Homo sapiens
GDIYGYDSYYYMDV

SEQ ID NO: 9532 - protein, 14 aa, Homo sapiens
GDPLRAVVTPPFDS

SEQ ID NO: 9533 - protein, 19 aa, Homo sapiens
GDPTGPATRKYYHFYYMDV

SEQ ID NO: 9534 - protein, 7 aa, Homo sapiens
GDSNRPS

SEQ ID NO: 9535 - protein, 7 aa, Homo sapiens
GDSQRPS

SEQ ID NO: 9536 - protein, 7 aa, Homo sapiens
GDTAMVI

SEQ ID NO: 9537 - protein, 7 aa, Homo sapiens
GDTTLDS

SEQ ID NO: 9538 - protein, 7 aa, Homo sapiens
GDTTMAD

SEQ ID NO: 9539 - protein, 7 aa, Homo sapiens
GDTTMGP

SEQ ID NO: 9540 - protein, 7 aa, Homo sapiens
GDWGIDY

SEQ ID NO: 9541 - protein, 8 aa, Homo sapiens
GDYAYFDY

SEQ ID NO: 9542 - protein, 5 aa, Homo sapiens
GDYWS

SEQ ID NO: 9543 - protein, 7 aa, Homo sapiens
GDYYFDY

SEQ ID NO: 9544 - protein, 12 aa, Homo sapiens
GEFEWELNAFDI

SEQ ID NO: 9545 - protein, 9 aa, Homo sapiens
GEGAWGDNC

SEQ ID NO: 9546 - protein, 10 aa, Homo sapiens
GEGSGSYSDY

SEQ ID NO: 9547 - protein, 14 aa, Homo sapiens
GELPGDSVGYWFDS

SEQ ID NO: 9548 - protein, 16 aa, Homo sapiens
GENFGMGTYIGVWFDP

SEQ ID NO: 9549 - protein, 7 aa, Homo sapiens
GENQRPS

SEQ ID NO: 9550 - protein, 15 aa, Homo sapiens
GEPPCGGDCHDAFDI

SEQ ID NO: 9551 - protein, 21 aa, Homo sapiens
GERFFDFWSAYDDNGPDGFDI

SEQ ID NO: 9552 - protein, 21 aa, Homo sapiens
GERRLMFADFLGEYPKDGFDV

SEQ ID NO: 9553 - protein, 95 aa, Homo sapiens
GESGGGLVQPGRSLRLSCAGSGFTFDDYAMHWVRQAPGKGLEWVSGISWNSGSIGYADSVKGRFTISRDNAKNSLYLQMNSLRAEDTALYYCGKD

SEQ ID NO: 9554 - protein, 119 aa, Homo sapiens
GESGGGLVQPGRSLRLSCAGSGFTFDDYAMHWVRQAPGKGLEWVSGISWNSGSIGYADSVKGRFTISRDNAKNSLYLQMNSLRAEDTALYYCGKDESSSSLFGGGLGYWGQGTLVTVSS

SEQ ID NO: 9555 - protein, 7 aa, Homo sapiens
GESSRGT

SEQ ID NO: 9556 - protein, 7 aa, Homo sapiens
GETFLDV

SEQ ID NO: 9557 - protein, 7 aa, Homo sapiens
GETFYDY

SEQ ID NO: 9558 - protein, 7 aa, Homo sapiens
GETHFDL

SEQ ID NO: 9559 - protein, 7 aa, Homo sapiens
GETTLIN

SEQ ID NO: 9560 - protein, 13 aa, Homo sapiens
GEWGSSSWYAFDY

SEQ ID NO: 9561 - protein, 8 aa, Homo sapiens
GEYRGIDY

SEQ ID NO: 9562 - protein, 17 aa, Homo sapiens
GFDPEDGETIYAQKFQG

SEQ ID NO: 9563 - protein, 17 aa, Homo sapiens
GFDPEDRETIYAQKFQG

SEQ ID NO: 9564 - protein, 17 aa, Homo sapiens
GFDPEDRETLYAQRFQG

SEQ ID NO: 9565 - protein, 17 aa, Homo sapiens
GFDRIAGKRNYAQKFQG

SEQ ID NO: 9566 - protein, 5 aa, Homo sapiens
GFFCS

SEQ ID NO: 9567 - protein, 5 aa, Homo sapiens
GFGIS

SEQ ID NO: 9568 - protein, 5 aa, Homo sapiens
GFGMD

SEQ ID NO: 9569 - protein, 16 aa, Homo sapiens
GFGQLSLDGYKYYFDY

SEQ ID NO: 9570 - protein, 17 aa, Homo sapiens
GFIPIFGTPRYAERFQG

SEQ ID NO: 9571 - protein, 9 aa, Homo sapiens
GFLKTGFDF

SEQ ID NO: 9572 - protein, 17 aa, Homo sapiens
GFNRQYGERIYAQKFQG

SEQ ID NO: 9573 - protein, 17 aa, Homo sapiens
GFSGGGTSTYYTDSVKG

SEQ ID NO: 9574 - protein, 17 aa, Homo sapiens
GFSGNGNSAYYADSVKG

SEQ ID NO: 9575 - protein, 17 aa, Homo sapiens
GFSGSGGSTYYTDSVKG

SEQ ID NO: 9576 - protein, 17 aa, Homo sapiens
GFSGSGSSTYYADSVKG

SEQ ID NO: 9577 - protein, 18 aa, Homo sapiens
GFSSGSGSSTYYVDSVKG

SEQ ID NO: 9578 - protein, 17 aa, Homo sapiens
GFVPVFGAANYAQKFQG

SEQ ID NO: 9579 - protein, 5 aa, Homo sapiens
GFYIH

SEQ ID NO: 9580 - protein, 10 aa, Homo sapiens
GGAAADWLNP

SEQ ID NO: 9581 - protein, 13 aa, Homo sapiens
GGAGWGTKNYFHS

SEQ ID NO: 9582 - protein, 18 aa, Homo sapiens
GGAITGPGVVMNHYGMDV

SEQ ID NO: 9583 - protein, 11 aa, Homo sapiens
GGDIIERRSVH

SEQ ID NO: 9584 - protein, 11 aa, Homo sapiens
GGDIIGSRAVH

SEQ ID NO: 9585 - protein, 13 aa, Homo sapiens
GGDILTGRTRFDY

SEQ ID NO: 9586 - protein, 16 aa, Homo sapiens
GGDKPGISVAGNYFDY

SEQ ID NO: 9587 - protein, 11 aa, Homo sapiens
GGDNIGSESVN

SEQ ID NO: 9588 - protein, 11 aa, Homo sapiens
GGDNIGSKSVQ

SEQ ID NO: 9589 - protein, 15 aa, Homo sapiens
GGDQLLRGYYFVMDV

SEQ ID NO: 9590 - protein, 15 aa, Homo sapiens
GGDSPVATIAYYFDH

SEQ ID NO: 9591 - protein, 15 aa, Homo sapiens
GGDSPVATIAYYFDY

SEQ ID NO: 9592 - protein, 11 aa, Homo sapiens
GGDVNTMAQDY

SEQ ID NO: 9593 - protein, 7 aa, Homo sapiens
GGDYFWA

SEQ ID NO: 9594 - protein, 23 aa, Homo sapiens
GGEIASMSAVMKGSMRRDDFPDY

SEQ ID NO: 9595 - protein, 11 aa, Homo sapiens
GGEKIGRKSVN

SEQ ID NO: 9596 - protein, 23 aa, Homo sapiens
GGEMASMAALMRGSLRRDDFPDY

SEQ ID NO: 9597 - protein, 10 aa, Homo sapiens
GGESGWSLES

SEQ ID NO: 9598 - protein, 9 aa, Homo sapiens
GGFGIAFDI

SEQ ID NO: 9599 - protein, 14 aa, Homo sapiens
GGFTIIRGGGFFEY

SEQ ID NO: 9600 - protein, 13 aa, Homo sapiens
GGFTWIQLWLFDY

SEQ ID NO: 9601 - protein, 12 aa, Homo sapiens
GGGAGRPHRPYI

SEQ ID NO: 9602 - protein, 19 aa, Homo sapiens
GGGAGSSTFDYQYYYYMDV

SEQ ID NO: 9603 - protein, 10 aa, Homo sapiens
GGGAGSYSDH

SEQ ID NO: 9604 - protein, 9 aa, Homo sapiens
GGGGIPFDP

SEQ ID NO: 9605 - protein, 9 aa, Homo sapiens
GGGNSWGGY

SEQ ID NO: 9606 - protein, 19 aa, Homo sapiens
GGGSGSSNFDYQYYYYMDV

SEQ ID NO: 9607 - protein, 19 aa, Homo sapiens
GGGSGSSNFHYQYYYHMDV

SEQ ID NO: 9608 - protein, 19 aa, Homo sapiens
GGGSGSSNFNYQYYYYMDV

SEQ ID NO: 9609 - protein, 13 aa, Homo sapiens
GGGTPFNLGAFDI

SEQ ID NO: 9610 - protein, 10 aa, Homo sapiens
GGGVYDYDLY

SEQ ID NO: 9611 - protein, 15 aa, Homo sapiens
GGGYHISGERGFLDV

SEQ ID NO: 9612 - protein, 12 aa, Homo sapiens
GGGYHSLSRLDP

SEQ ID NO: 9613 - protein, 12 aa, Homo sapiens
GGGYHSLSWLGP

SEQ ID NO: 9614 - protein, 12 aa, Homo sapiens
GGGYHYQNYMDV

SEQ ID NO: 9615 - protein, 14 aa, Homo sapiens
GGGYNLQFGEGLYN

SEQ ID NO: 9616 - protein, 13 aa, Homo sapiens
GGGYYGSGSYSPY

SEQ ID NO: 9617 - protein, 11 aa, Homo sapiens
GGGYYPGHFQD

SEQ ID NO: 9618 - protein, 11 aa, Homo sapiens
GGGYYPNYFDH

SEQ ID NO: 9619 - protein, 12 aa, Homo sapiens
GGHDTIYSFFDY

SEQ ID NO: 9620 - protein, 9 aa, Homo sapiens
GGISDWFDP

SEQ ID NO: 9621 - protein, 17 aa, Homo sapiens
GGIVLVPAFTTSGGLDS

SEQ ID NO: 9622 - protein, 15 aa, Homo sapiens
GGIYDNGGYYRGIDH

SEQ ID NO: 9623 - protein, 15 aa, Homo sapiens
GGLGSYVRYYYYMDV

SEQ ID NO: 9624 - protein, 15 aa, Homo sapiens
GGLQHLEWLLYPFDL

SEQ ID NO: 9625 - protein, 11 aa, Homo sapiens
GGNDVGSKSVH

SEQ ID NO: 9626 - protein, 11 aa, Homo sapiens
GGNDVTSKSVH

SEQ ID NO: 9627 - protein, 14 aa, Homo sapiens
GGNIYSSSWSGIEY

SEQ ID NO: 9628 - protein, 11 aa, Homo sapiens
GGNNIGDKSVH

SEQ ID NO: 9629 - protein, 11 aa, Homo sapiens
GGNNIGIKSVH

SEQ ID NO: 9630 - protein, 11 aa, Homo sapiens
GGNNIGNKSVH

SEQ ID NO: 9631 - protein, 11 aa, Homo sapiens
GGNNIGSESVH

SEQ ID NO: 9632 - protein, 11 aa, Homo sapiens
GGNNIGSKNVH

SEQ ID NO: 9633 - protein, 11 aa, Homo sapiens
GGNNIGSKSVH

SEQ ID NO: 9634 - protein, 11 aa, Homo sapiens
GGNNIGSRNVH

SEQ ID NO: 9635 - protein, 11 aa, Homo sapiens
GGNNIGTKIVH

SEQ ID NO: 9636 - protein, 11 aa, Homo sapiens
GGNNIRSRNVH

SEQ ID NO: 9637 - protein, 11 aa, Homo sapiens
GGNNLRSKSVH

SEQ ID NO: 9638 - protein, 22 aa, Homo sapiens
GGNPIKNYDFLTAYIGPEYIDY

SEQ ID NO: 9639 - protein, 11 aa, Homo sapiens
GGNSIGSKSVH

SEQ ID NO: 9640 - protein, 9 aa, Homo sapiens
GGNYGGLDY

SEQ ID NO: 9641 - protein, 11 aa, Homo sapiens
GGNYIASKSVH

SEQ ID NO: 9642 - protein, 11 aa, Homo sapiens
GGNYYPNYFDS

SEQ ID NO: 9643 - protein, 10 aa, Homo sapiens
GGPLDYGLDV

SEQ ID NO: 9644 - protein, 7 aa, Homo sapiens
GGPTFDP

SEQ ID NO: 9645 - protein, 16 aa, Homo sapiens
GGPWRFGESSLNYFDY

SEQ ID NO: 9646 - protein, 18 aa, Homo sapiens
GGPYCGSDCSSNYNYFDY

SEQ ID NO: 9647 - protein, 16 aa, Homo sapiens
GGQWLDPFQYSYYMDV

SEQ ID NO: 9648 - protein, 17 aa, Homo sapiens
GGRKRVVVAAAAYYFDY

SEQ ID NO: 9649 - protein, 12 aa, Homo sapiens
GGRVPWLGYMDV

SEQ ID NO: 9650 - protein, 15 aa, Homo sapiens
GGSGSYYNVLGYFDY

SEQ ID NO: 9651 - protein, 20 aa, Homo sapiens
GGSHPIYDYDGSGLLLGFDY

SEQ ID NO: 9652 - protein, 12 aa, Homo sapiens
GGSHPTYNWFDP

SEQ ID NO: 9653 - protein, 11 aa, Homo sapiens
GGSNIGSKTVH

SEQ ID NO: 9654 - protein, 6 aa, Homo sapiens
GGSQYT

SEQ ID NO: 9655 - protein, 9 aa, Homo sapiens
GGSSDWLDP

SEQ ID NO: 9656 - protein, 13 aa, Homo sapiens
GGSSKWLVFPFDS

SEQ ID NO: 9657 - protein, 7 aa, Homo sapiens
GGSSLQS

SEQ ID NO: 9658 - protein, 7 aa, Homo sapiens
GGSSRAT

SEQ ID NO: 9659 - protein, 7 aa, Homo sapiens
GGSYYWG

SEQ ID NO: 9660 - protein, 11 aa, Homo sapiens
GGTGDGDYFDY

SEQ ID NO: 9661 - protein, 18 aa, Homo sapiens
GGTNHCDHSCYWGGSFDL

SEQ ID NO: 9662 - protein, 11 aa, Homo sapiens
GGTNIGSKSVH

SEQ ID NO: 9663 - protein, 7 aa, Homo sapiens
GGTYFDY

SEQ ID NO: 9664 - protein, 10 aa, Homo sapiens
GGVATIQTDY

SEQ ID NO: 9665 - protein, 15 aa, Homo sapiens
GGVQFGLPRVGHLDY

SEQ ID NO: 9666 - protein, 11 aa, Homo sapiens
GGYAGLDVFDF

SEQ ID NO: 9667 - protein, 19 aa, Homo sapiens
GGYCSGGSCYSGYYYYMDV

SEQ ID NO: 9668 - protein, 16 aa, Homo sapiens
GGYCSRTSCYDDAFDI

SEQ ID NO: 9669 - protein, 6 aa, Homo sapiens
GGYCWG

SEQ ID NO: 9670 - protein, 11 aa, Homo sapiens
GGYDFSDRVDY

SEQ ID NO: 9671 - protein, 11 aa, Homo sapiens
GGYNIGSQSVH

SEQ ID NO: 9672 - protein, 6 aa, Homo sapiens
GGYNWG

SEQ ID NO: 9673 - protein, 13 aa, Homo sapiens
GGYSYGDGDAFDI

SEQ ID NO: 9674 - protein, 15 aa, Homo sapiens
GGYYFKPPEQIQADY

SEQ ID NO: 9675 - protein, 11 aa, Homo sapiens
GGYYNTSPLEQ

SEQ ID NO: 9676 - protein, 5 aa, Homo sapiens
GHAIH

SEQ ID NO: 9677 - protein, 5 aa, Homo sapiens
GHAMN

SEQ ID NO: 9678 - protein, 5 aa, Homo sapiens
GHAVH

SEQ ID NO: 9679 - protein, 5 aa, Homo sapiens
GHILG

SEQ ID NO: 9680 - protein, 7 aa, Homo sapiens
GHSNRPS

SEQ ID NO: 9681 - protein, 15 aa, Homo sapiens
GHSWDGSTYYRAFDC

SEQ ID NO: 9682 - protein, 5 aa, Homo sapiens
GHTVS

SEQ ID NO: 9683 - protein, 6 aa, Homo sapiens
GHWSNS

SEQ ID NO: 9684 - protein, 5 aa, Homo sapiens
GHYIH

SEQ ID NO: 9685 - protein, 5 aa, Homo sapiens
GHYME

SEQ ID NO: 9686 - protein, 5 aa, Homo sapiens
GHYMQ

SEQ ID NO: 9687 - protein, 6 aa, Homo sapiens
GHYNGQ

SEQ ID NO: 9688 - protein, 6 aa, Homo sapiens
GHYTGQ

SEQ ID NO: 9689 - protein, 17 aa, Homo sapiens
GIAPLFGSTNYAQKFQG

SEQ ID NO: 9690 - protein, 6 aa, Homo sapiens
GIDFDY

SEQ ID NO: 9691 - protein, 17 aa, Homo sapiens
GIDGSGFSLYYGDSVGG

SEQ ID NO: 9692 - protein, 17 aa, Homo sapiens
GIFAIFGTTNYAQKFQG

SEQ ID NO: 9693 - protein, 17 aa, Homo sapiens
GIFAVFGTTNYAQKFQG

SEQ ID NO: 9694 - protein, 17 aa, Homo sapiens
GIFWNGGIRGYADSVKG

SEQ ID NO: 9695 - protein, 17 aa, Homo sapiens
GIGGTDGSTYYTDSVKG

SEQ ID NO: 9696 - protein, 17 aa, Homo sapiens
GIGVFGGVTNYVESVKG

SEQ ID NO: 9697 - protein, 17 aa, Homo sapiens
GIGWNSGNIAYADSVKG

SEQ ID NO: 9698 - protein, 17 aa, Homo sapiens
GIGWNSGSIGYADSVKG

SEQ ID NO: 9699 - protein, 17 aa, Homo sapiens
GIIAIFGIANYAQKYQG

SEQ ID NO: 9700 - protein, 17 aa, Homo sapiens
GIIAIFGIPNYAQKFQD

SEQ ID NO: 9701 - protein, 17 aa, Homo sapiens
GIIAIFGTAKYAQKFQG

SEQ ID NO: 9702 - protein, 17 aa, Homo sapiens
GIIAIFGTANYAQKFQG

SEQ ID NO: 9703 - protein, 17 aa, Homo sapiens
GIIAIFGTPNYAQKFQG

SEQ ID NO: 9704 - protein, 17 aa, Homo sapiens
GIIAIFGTPTYAQKFQG

SEQ ID NO: 9705 - protein, 17 aa, Homo sapiens
GIIAIFGTPTYAQNFQG

SEQ ID NO: 9706 - protein, 17 aa, Homo sapiens
GIIAIFGTTHYSQKFQG

SEQ ID NO: 9707 - protein, 17 aa, Homo sapiens
GIIAIFGTTNYAQKFQD

SEQ ID NO: 9708 - protein, 17 aa, Homo sapiens
GIIAIFGTTNYAQKFQG

SEQ ID NO: 9709 - protein, 17 aa, Homo sapiens
GIIAIFGTTSYAQKFQG

SEQ ID NO: 9710 - protein, 17 aa, Homo sapiens
GIIAIFGTVNYAQKFQG

SEQ ID NO: 9711 - protein, 17 aa, Homo sapiens
GIIAIFGVPKYAQKFQG

SEQ ID NO: 9712 - protein, 17 aa, Homo sapiens
GIIAIFHTTHYAQKFQG

SEQ ID NO: 9713 - protein, 17 aa, Homo sapiens
GIIAIFHTTNYAKKFQG

SEQ ID NO: 9714 - protein, 17 aa, Homo sapiens
GIIAIFNTATYAQKFQG

SEQ ID NO: 9715 - protein, 17 aa, Homo sapiens
GIIAIFNTPKYAQKFQG

SEQ ID NO: 9716 - protein, 17 aa, Homo sapiens
GIIAIFNTPNYAHKFQG

SEQ ID NO: 9717 - protein, 17 aa, Homo sapiens
GIIAIFNTPNYAQKFQD

SEQ ID NO: 9718 - protein, 17 aa, Homo sapiens
GIIAIFNTPNYAQKFQG

SEQ ID NO: 9719 - protein, 17 aa, Homo sapiens
GIIAIFNVPNYAQKYQG

SEQ ID NO: 9720 - protein, 17 aa, Homo sapiens
GIIAIFRTAKYAEKFQG

SEQ ID NO: 9721 - protein, 17 aa, Homo sapiens
GIIAIFRTAKYAERFQG

SEQ ID NO: 9722 - protein, 17 aa, Homo sapiens
GIIAIFRTAKYSEKFQG

SEQ ID NO: 9723 - protein, 17 aa, Homo sapiens
GIIAIFRTTNYAQKFQG

SEQ ID NO: 9724 - protein, 17 aa, Homo sapiens
GIIALFGVSNYAQKFQG

SEQ ID NO: 9725 - protein, 17 aa, Homo sapiens
GIIAVFGTAKYAQKFQG

SEQ ID NO: 9726 - protein, 17 aa, Homo sapiens
GIIAVFGTANHAQKFQG

SEQ ID NO: 9727 - protein, 17 aa, Homo sapiens
GIIAVFGTANYAQKFQG

SEQ ID NO: 9728 - protein, 17 aa, Homo sapiens
GIIAVFGTTNYAQKFRG

SEQ ID NO: 9729 - protein, 17 aa, Homo sapiens
GIIAVFGTTNYAQSLQG

SEQ ID NO: 9730 - protein, 17 aa, Homo sapiens
GIIAVFGTTQYAQKLQG

SEQ ID NO: 9731 - protein, 17 aa, Homo sapiens
GIIGIFGTANYAQKFQG

SEQ ID NO: 9732 - protein, 17 aa, Homo sapiens
GIIGIFGTTKYAQTFQG

SEQ ID NO: 9733 - protein, 17 aa, Homo sapiens
GIIGIFRTTKYAQKFQG

SEQ ID NO: 9734 - protein, 17 aa, Homo sapiens
GIIGLFGTTKYAQTFQD

SEQ ID NO: 9735 - protein, 17 aa, Homo sapiens
GIIGMFGIAKYAQKFEG

SEQ ID NO: 9736 - protein, 17 aa, Homo sapiens
GIIGMFGIAKYAQKFQG

SEQ ID NO: 9737 - protein, 17 aa, Homo sapiens
GIIGMFGITNYAQKFQG

SEQ ID NO: 9738 - protein, 17 aa, Homo sapiens
GIIGMFGTAKYAQMFQG

SEQ ID NO: 9739 - protein, 17 aa, Homo sapiens
GIIGMFGTANYAQKFQG

SEQ ID NO: 9740 - protein, 17 aa, Homo sapiens
GIIGMFGTPNYGQKFQG

SEQ ID NO: 9741 - protein, 17 aa, Homo sapiens
GIIGMFGTTNYAQKFQG

SEQ ID NO: 9742 - protein, 17 aa, Homo sapiens
GIIGMFGTTNYAQNFQG

SEQ ID NO: 9743 - protein, 17 aa, Homo sapiens
GIIGMFGTTNYAQRFQG

SEQ ID NO: 9744 - protein, 17 aa, Homo sapiens
GIIGMFGTTRYAQSLQG

SEQ ID NO: 9745 - protein, 17 aa, Homo sapiens
GIIGMFGTTTYAQKFQG

SEQ ID NO: 9746 - protein, 17 aa, Homo sapiens
GIIGMFGTTTYAQKLQD

SEQ ID NO: 9747 - protein, 17 aa, Homo sapiens
GIIGMFGTVKYAQKFQG

SEQ ID NO: 9748 - protein, 17 aa, Homo sapiens
GIIGMFGVPKYAQKMEG

SEQ ID NO: 9749 - protein, 17 aa, Homo sapiens
GIIGMFGVTKYAQKFQD

SEQ ID NO: 9750 - protein, 17 aa, Homo sapiens
GIIGMFRTAHYAQKFQG

SEQ ID NO: 9751 - protein, 17 aa, Homo sapiens
GIIGMFRTANYAQKFQG

SEQ ID NO: 9752 - protein, 17 aa, Homo sapiens
GIIGMFRTVNYAQKFQG

SEQ ID NO: 9753 - protein, 17 aa, Homo sapiens
GIIGNSNTKEYADSVKG

SEQ ID NO: 9754 - protein, 17 aa, Homo sapiens
GIIGVFGTVNYAQMFQG

SEQ ID NO: 9755 - protein, 17 aa, Homo sapiens
GIIGVFGVPRYAQNFQG

SEQ ID NO: 9756 - protein, 17 aa, Homo sapiens
GIIGVFRATSYAQKFQG

SEQ ID NO: 9757 - protein, 17 aa, Homo sapiens
GIIPAIGTANYAQKFQG

SEQ ID NO: 9758 - protein, 17 aa, Homo sapiens
GIIPALGSGNYAQNFQG

SEQ ID NO: 9759 - protein, 17 aa, Homo sapiens
GIIPFFGASNYPQKFRG

SEQ ID NO: 9760 - protein, 17 aa, Homo sapiens
GIIPFIGTANYAQKFQG

SEQ ID NO: 9761 - protein, 17 aa, Homo sapiens
GIIPFSRKTNYARKFQG

SEQ ID NO: 9762 - protein, 17 aa, Homo sapiens
GIIPIDATPNYSQRFQD

SEQ ID NO: 9763 - protein, 17 aa, Homo sapiens
GIIPIFATAKYAQKYQG

SEQ ID NO: 9764 - protein, 17 aa, Homo sapiens
GIIPIFDTAKYAQKFQG

SEQ ID NO: 9765 - protein, 17 aa, Homo sapiens
GIIPIFDTANYAQKFQG

SEQ ID NO: 9766 - protein, 17 aa, Homo sapiens
GIIPIFETANYAQKFQG

SEQ ID NO: 9767 - protein, 17 aa, Homo sapiens
GIIPIFGATHYAQNFQG

SEQ ID NO: 9768 - protein, 17 aa, Homo sapiens
GIIPIFGIANYAQKFQG

SEQ ID NO: 9769 - protein, 17 aa, Homo sapiens
GIIPIFGKPNFAQNFQG

SEQ ID NO: 9770 - protein, 17 aa, Homo sapiens
GIIPIFGRSDYAQKFQG

SEQ ID NO: 9771 - protein, 17 aa, Homo sapiens
GIIPIFGSPNYAQKFQG

SEQ ID NO: 9772 - protein, 17 aa, Homo sapiens
GIIPIFGSSSYAQKFQG

SEQ ID NO: 9773 - protein, 17 aa, Homo sapiens
GIIPIFGTAKYAQKFQG

SEQ ID NO: 9774 - protein, 17 aa, Homo sapiens
GIIPIFGTAKYAQNFQG

SEQ ID NO: 9775 - protein, 17 aa, Homo sapiens
GIIPIFGTANYAQKFQD

SEQ ID NO: 9776 - protein, 17 aa, Homo sapiens
GIIPIFGTANYAQKFQG

SEQ ID NO: 9777 - protein, 17 aa, Homo sapiens
GIIPIFGTASYAQIFQG

SEQ ID NO: 9778 - protein, 17 aa, Homo sapiens
GIIPIFGTASYAQNFQG

SEQ ID NO: 9779 - protein, 17 aa, Homo sapiens
GIIPIFGTATYAQKFQG

SEQ ID NO: 9780 - protein, 17 aa, Homo sapiens
GIIPIFGTPKYAQKFQG

SEQ ID NO: 9781 - protein, 17 aa, Homo sapiens
GIIPIFGTPKYAQNFQG

SEQ ID NO: 9782 - protein, 17 aa, Homo sapiens
GIIPIFGTPNYAQKFQG

SEQ ID NO: 9783 - protein, 17 aa, Homo sapiens
GIIPIFGTPTYAQKFQG

SEQ ID NO: 9784 - protein, 17 aa, Homo sapiens
GIIPIFGTRNYAQKFQG

SEQ ID NO: 9785 - protein, 17 aa, Homo sapiens
GIIPIFGTSNYPQRFQG

SEQ ID NO: 9786 - protein, 17 aa, Homo sapiens
GIIPIFGTTHYAQKFQG

SEQ ID NO: 9787 - protein, 17 aa, Homo sapiens
GIIPIFGTTKYAQKFQG

SEQ ID NO: 9788 - protein, 17 aa, Homo sapiens
GIIPIFGTTKYAQRFQG

SEQ ID NO: 9789 - protein, 17 aa, Homo sapiens
GIIPIFGTTNYAQKFQG

SEQ ID NO: 9790 - protein, 17 aa, Homo sapiens
GIIPIFGTTRFAPRFQG

SEQ ID NO: 9791 - protein, 17 aa, Homo sapiens
GIIPIFGVPKFAQKFQG

SEQ ID NO: 9792 - protein, 17 aa, Homo sapiens
GIIPIFGVSKYAQRFQG

SEQ ID NO: 9793 - protein, 17 aa, Homo sapiens
GIIPIFHTAKYAPRFQG

SEQ ID NO: 9794 - protein, 17 aa, Homo sapiens
GIIPIFHTTKYAQKFQG

SEQ ID NO: 9795 - protein, 17 aa, Homo sapiens
GIIPIFHTTNYAQKFQG

SEQ ID NO: 9796 - protein, 17 aa, Homo sapiens
GIIPIFKTASYAQKLQG

SEQ ID NO: 9797 - protein, 17 aa, Homo sapiens
GIIPIFNTANYAQNFQG

SEQ ID NO: 9798 - protein, 17 aa, Homo sapiens
GIIPIFNTPRYAQKFQG

SEQ ID NO: 9799 - protein, 17 aa, Homo sapiens
GIIPIFRRPNSAQKFQG

SEQ ID NO: 9800 - protein, 17 aa, Homo sapiens
GIIPIFRSANYAQKFQG

SEQ ID NO: 9801 - protein, 17 aa, Homo sapiens
GIIPIFRTTKYAQKFQG

SEQ ID NO: 9802 - protein, 17 aa, Homo sapiens
GIIPIFRTTNYAQKFQG

SEQ ID NO: 9803 - protein, 17 aa, Homo sapiens
GIIPIHDTAYYGQTFQD

SEQ ID NO: 9804 - protein, 17 aa, Homo sapiens
GIIPLFATSNYAQKFQG

SEQ ID NO: 9805 - protein, 17 aa, Homo sapiens
GIIPLFGSANYAQKFQG

SEQ ID NO: 9806 - protein, 17 aa, Homo sapiens
GIIPLFGTANYAQKFQG

SEQ ID NO: 9807 - protein, 17 aa, Homo sapiens
GIIPLFGTTNTAQKFQG

SEQ ID NO: 9808 - protein, 17 aa, Homo sapiens
GIIPLFGTTNYAQKFKG

SEQ ID NO: 9809 - protein, 17 aa, Homo sapiens
GIIPLFGTTNYAQKFQD

SEQ ID NO: 9810 - protein, 17 aa, Homo sapiens
GIIPLFGTTYYAQKFQG

SEQ ID NO: 9811 - protein, 17 aa, Homo sapiens
GIIPLFRTTNYAHKFQG

SEQ ID NO: 9812 - protein, 17 aa, Homo sapiens
GIIPLFSPAKYAQKFHG

SEQ ID NO: 9813 - protein, 17 aa, Homo sapiens
GIIPMFDIANYAQKFQG

SEQ ID NO: 9814 - protein, 17 aa, Homo sapiens
GIIPMFGTANYAQKFQG

SEQ ID NO: 9815 - protein, 17 aa, Homo sapiens
GIIPMFGTANYGQKFQD

SEQ ID NO: 9816 - protein, 17 aa, Homo sapiens
GIIPMFGTPNYAQKFQG

SEQ ID NO: 9817 - protein, 17 aa, Homo sapiens
GIIPMFGTTKGAQKFQG

SEQ ID NO: 9818 - protein, 17 aa, Homo sapiens
GIIPMFGTTNYARKFKG

SEQ ID NO: 9819 - protein, 17 aa, Homo sapiens
GIIPMFGTTTYAQKFQG

SEQ ID NO: 9820 - protein, 17 aa, Homo sapiens
GIIPMFRITNYAQKFQG

SEQ ID NO: 9821 - protein, 17 aa, Homo sapiens
GIIPMFTTANYAQNFQG

SEQ ID NO: 9822 - protein, 17 aa, Homo sapiens
GIIPMIGTANYAQKFQG

SEQ ID NO: 9823 - protein, 17 aa, Homo sapiens
GIIPMLGIEKDAQQFQD

SEQ ID NO: 9824 - protein, 17 aa, Homo sapiens
GIIPMLGTTRYAQKFQG

SEQ ID NO: 9825 - protein, 17 aa, Homo sapiens
GIIPMMDTANYIRKFQG

SEQ ID NO: 9826 - protein, 17 aa, Homo sapiens
GIIPTFGLTKYAQKFQG

SEQ ID NO: 9827 - protein, 17 aa, Homo sapiens
GIIPTFGTATYAQRFQG

SEQ ID NO: 9828 - protein, 17 aa, Homo sapiens
GIIPVFGTAIYAQKFQG

SEQ ID NO: 9829 - protein, 17 aa, Homo sapiens
GIIPVFGTANYAHNFQG

SEQ ID NO: 9830 - protein, 17 aa, Homo sapiens
GIIPVFGTTKYAQKFQG

SEQ ID NO: 9831 - protein, 17 aa, Homo sapiens
GIIRIFGIANYAQKFQG

SEQ ID NO: 9832 - protein, 17 aa, Homo sapiens
GIISIFGVARYAQKFQG

SEQ ID NO: 9833 - protein, 17 aa, Homo sapiens
GIISMLGTTNYAQKFQG

SEQ ID NO: 9834 - protein, 17 aa, Homo sapiens
GIITMFGPANYAQKFQG

SEQ ID NO: 9835 - protein, 17 aa, Homo sapiens
GIITMFGPVKYAQKFQD

SEQ ID NO: 9836 - protein, 17 aa, Homo sapiens
GIITMFGTANYAQKFQG

SEQ ID NO: 9837 - protein, 17 aa, Homo sapiens
GIKGIFRTANYAEKFQG

SEQ ID NO: 9838 - protein, 17 aa, Homo sapiens
GILAIFGTPNYAQNFQG

SEQ ID NO: 9839 - protein, 17 aa, Homo sapiens
GILAIFGTTKYAQKFQG

SEQ ID NO: 9840 - protein, 17 aa, Homo sapiens
GILALFGTTYYAQKFQG

SEQ ID NO: 9841 - protein, 17 aa, Homo sapiens
GILAVFGVPTYAQKFQG

SEQ ID NO: 9842 - protein, 17 aa, Homo sapiens
GILGIFGTANYAQKFQG

SEQ ID NO: 9843 - protein, 17 aa, Homo sapiens
GILGMFRTAKYAQRFQG

SEQ ID NO: 9844 - protein, 17 aa, Homo sapiens
GILPIFGTANYAQKFRG

SEQ ID NO: 9845 - protein, 17 aa, Homo sapiens
GILPIFNTASYAQKFQG

SEQ ID NO: 9846 - protein, 17 aa, Homo sapiens
GILPIFRTAKYAQKFQG

SEQ ID NO: 9847 - protein, 17 aa, Homo sapiens
GILPMFGTTNYAQKFQG

SEQ ID NO: 9848 - protein, 15 aa, Homo sapiens
GILSWVVAATHYFDY

SEQ ID NO: 9849 - protein, 8 aa, Homo sapiens
GIMAAFDH

SEQ ID NO: 9850 - protein, 17 aa, Homo sapiens
GIMAIFGVIKYAQKFQG

SEQ ID NO: 9851 - protein, 17 aa, Homo sapiens
GIMAIFHTVKYAEKFQG

SEQ ID NO: 9852 - protein, 17 aa, Homo sapiens
GIMALFGAPNYAQKFQG

SEQ ID NO: 9853 - protein, 17 aa, Homo sapiens
GIMALFGVTNYAQRFQG

SEQ ID NO: 9854 - protein, 17 aa, Homo sapiens
GIMGMFRTAHNAQKFQG

SEQ ID NO: 9855 - protein, 17 aa, Homo sapiens
GIMPIFGSTKYAQKFQG

SEQ ID NO: 9856 - protein, 17 aa, Homo sapiens
GIMPIFGTAHYPQKFQG

SEQ ID NO: 9857 - protein, 17 aa, Homo sapiens
GIMPIFGTAKYAQNFQG

SEQ ID NO: 9858 - protein, 17 aa, Homo sapiens
GIMPIFGTPKYAQRFQG

SEQ ID NO: 9859 - protein, 17 aa, Homo sapiens
GIMPIFGTTKYAQKFQG

SEQ ID NO: 9860 - protein, 17 aa, Homo sapiens
GIMPIFGTTKYAQRFQG

SEQ ID NO: 9861 - protein, 17 aa, Homo sapiens
GIMPIFGTTNYAQKFQG

SEQ ID NO: 9862 - protein, 17 aa, Homo sapiens
GIMPIFGTTNYAQRFKG

SEQ ID NO: 9863 - protein, 17 aa, Homo sapiens
GIMPIFGTTNYAQRFQG

SEQ ID NO: 9864 - protein, 17 aa, Homo sapiens
GIMPIFHITKYAQRFQG

SEQ ID NO: 9865 - protein, 17 aa, Homo sapiens
GIMPIFHVTKYAQRFQG

SEQ ID NO: 9866 - protein, 17 aa, Homo sapiens
GIMPIFRLANYGQKFQG

SEQ ID NO: 9867 - protein, 17 aa, Homo sapiens
GIMPILRTPMYALKFQG

SEQ ID NO: 9868 - protein, 17 aa, Homo sapiens
GIMPLFGTANYAQKFQG

SEQ ID NO: 9869 - protein, 17 aa, Homo sapiens
GIMPLFGTTNYAQIFQA

SEQ ID NO: 9870 - protein, 17 aa, Homo sapiens
GIMPLFGTTNYAQRFQG

SEQ ID NO: 9871 - protein, 17 aa, Homo sapiens
GIMPLFGTTQFAQRFQG

SEQ ID NO: 9872 - protein, 17 aa, Homo sapiens
GIMPLFGTTTYAQKFQG

SEQ ID NO: 9873 - protein, 17 aa, Homo sapiens
GIMPLFRTTNYAQKFQG

SEQ ID NO: 9874 - protein, 17 aa, Homo sapiens
GIMPMFGTANYAQKFQG

SEQ ID NO: 9875 - protein, 17 aa, Homo sapiens
GIMPMFGTTKYAEKFQG

SEQ ID NO: 9876 - protein, 17 aa, Homo sapiens
GIMPMFGTTNYAERFQG

SEQ ID NO: 9877 - protein, 17 aa, Homo sapiens
GIMPMFGTTNYAQRFQG

SEQ ID NO: 9878 - protein, 17 aa, Homo sapiens
GIMPMFGTTTYAQRFQG

SEQ ID NO: 9879 - protein, 17 aa, Homo sapiens
GIMPMFRSTNYAQKFQG

SEQ ID NO: 9880 - protein, 17 aa, Homo sapiens
GIMSMFRTTNYAQKFRG

SEQ ID NO: 9881 - protein, 17 aa, Homo sapiens
GIMTMFGKTNYAQKFQG

SEQ ID NO: 9882 - protein, 17 aa, Homo sapiens
GINAIFGTPNYAQKFQG

SEQ ID NO: 9883 - protein, 17 aa, Homo sapiens
GINDSGGSTYYADSVKG

SEQ ID NO: 9884 - protein, 17 aa, Homo sapiens
GINGFFGTTNYAEKFQG

SEQ ID NO: 9885 - protein, 17 aa, Homo sapiens
GINLLFGTTNYEQKFQG

SEQ ID NO: 9886 - protein, 17 aa, Homo sapiens
GINPIFGIANYAQRFQG

SEQ ID NO: 9887 - protein, 17 aa, Homo sapiens
GINPIFNIADYAQKFQG

SEQ ID NO: 9888 - protein, 17 aa, Homo sapiens
GINPIFRTPNYAQKFQG

SEQ ID NO: 9889 - protein, 17 aa, Homo sapiens
GINPILDITNYAQKFQG

SEQ ID NO: 9890 - protein, 17 aa, Homo sapiens
GINPLFGLPKYAQKFQG

SEQ ID NO: 9891 - protein, 17 aa, Homo sapiens
GINPMFGITDYAQQFQG

SEQ ID NO: 9892 - protein, 17 aa, Homo sapiens
GINPMFGIVDYAQKFQG

SEQ ID NO: 9893 - protein, 17 aa, Homo sapiens
GINPMFGIVKYAEKFQG

SEQ ID NO: 9894 - protein, 17 aa, Homo sapiens
GINPMFGIVNYAEKFQG

SEQ ID NO: 9895 - protein, 17 aa, Homo sapiens
GINPMFGIVNYAPKFQG

SEQ ID NO: 9896 - protein, 17 aa, Homo sapiens
GINPMFGIVNYAQKFQG

SEQ ID NO: 9897 - protein, 17 aa, Homo sapiens
GINPMFGLVDYAEKFQG

SEQ ID NO: 9898 - protein, 17 aa, Homo sapiens
GINPMFGTATYAQKFQG

SEQ ID NO: 9899 - protein, 17 aa, Homo sapiens
GINPMFGTSTYAQKFQG

SEQ ID NO: 9900 - protein, 17 aa, Homo sapiens
GINPMFGTVSYAQEFQG

SEQ ID NO: 9901 - protein, 17 aa, Homo sapiens
GINPMFKIVDYAPKFQG

SEQ ID NO: 9902 - protein, 17 aa, Homo sapiens
GINPMFKIVNYAQKFQG

SEQ ID NO: 9903 - protein, 17 aa, Homo sapiens
GINPMFRITNYAQRFQG

SEQ ID NO: 9904 - protein, 17 aa, Homo sapiens
GINPMFRIVDYAPKFKG

SEQ ID NO: 9905 - protein, 17 aa, Homo sapiens
GINPMFRIVNYAPKFQG

SEQ ID NO: 9906 - protein, 17 aa, Homo sapiens
GINPMFRIVNYAQKFQG

SEQ ID NO: 9907 - protein, 17 aa, Homo sapiens
GINPMFRLVDYAQKFQG

SEQ ID NO: 9908 - protein, 17 aa, Homo sapiens
GINPMFRLVNYAQKFQG

SEQ ID NO: 9909 - protein, 17 aa, Homo sapiens
GINPVFGAPNYAQRFQG

SEQ ID NO: 9910 - protein, 17 aa, Homo sapiens
GINPVFRTPNYAQKFQG

SEQ ID NO: 9911 - protein, 17 aa, Homo sapiens
GINRDSTSRSYADSAKG

SEQ ID NO: 9912 - protein, 17 aa, Homo sapiens
GINTAGDTTYYADSVKG

SEQ ID NO: 9913 - protein, 17 aa, Homo sapiens
GINTGNGKTEFSPKFQG

SEQ ID NO: 9914 - protein, 17 aa, Homo sapiens
GINWNDDNTDYSDSVKG

SEQ ID NO: 9915 - protein, 17 aa, Homo sapiens
GINWNGDSTGYADSVKG

SEQ ID NO: 9916 - protein, 17 aa, Homo sapiens
GINWNGGSTGYADSVKG

SEQ ID NO: 9917 - protein, 17 aa, Homo sapiens
GINWNGGSTGYTDSVKG

SEQ ID NO: 9918 - protein, 17 aa, Homo sapiens
GINWNGGSTYYADSVKG

SEQ ID NO: 9919 - protein, 17 aa, Homo sapiens
GINWNGNNIGYVDSVRG

SEQ ID NO: 9920 - protein, 17 aa, Homo sapiens
GINWNSEDMAHADSVRG

SEQ ID NO: 9921 - protein, 11 aa, Homo sapiens
GIPTTVVRFDI

SEQ ID NO: 9922 - protein, 19 aa, Homo sapiens
GIRATGSGGSTLYADSVKG

SEQ ID NO: 9923 - protein, 17 aa, Homo sapiens
GIRGNGGSTYYADSVKG

SEQ ID NO: 9924 - protein, 17 aa, Homo sapiens
GIRGSGGSTLYAASVKG

SEQ ID NO: 9925 - protein, 17 aa, Homo sapiens
GIRGSVGSTNYEDSVMG

SEQ ID NO: 9926 - protein, 17 aa, Homo sapiens
GISAIFGTTNYAQKFHG

SEQ ID NO: 9927 - protein, 17 aa, Homo sapiens
GISAIFGTTNYAQKFQG

SEQ ID NO: 9928 - protein, 17 aa, Homo sapiens
GISAIFGVPNYAQKFQG

SEQ ID NO: 9929 - protein, 17 aa, Homo sapiens
GISAIFGVPSYAQKFQG

SEQ ID NO: 9930 - protein, 17 aa, Homo sapiens
GISAIFNTANYAQKFRG

SEQ ID NO: 9931 - protein, 17 aa, Homo sapiens
GISAIFRTAQYAQKFQG

SEQ ID NO: 9932 - protein, 17 aa, Homo sapiens
GISALFHVAKYAQKFQG

SEQ ID NO: 9933 - protein, 17 aa, Homo sapiens
GISALFHVPKYAQTFQG

SEQ ID NO: 9934 - protein, 17 aa, Homo sapiens
GISAVFGTAGYAQKFQG

SEQ ID NO: 9935 - protein, 17 aa, Homo sapiens
GISGIFGTANYAQKFQG

SEQ ID NO: 9936 - protein, 18 aa, Homo sapiens
GISGNREGNRYYADSVRG

SEQ ID NO: 9937 - protein, 17 aa, Homo sapiens
GISGSGDRTYYVDSVKG

SEQ ID NO: 9938 - protein, 17 aa, Homo sapiens
GISGSGGSRYYADSVKG

SEQ ID NO: 9939 - protein, 17 aa, Homo sapiens
GISGSGGSTYYADSVKG

SEQ ID NO: 9940 - protein, 17 aa, Homo sapiens
GISPIFGTTNYAQKFQG

SEQ ID NO: 9941 - protein, 17 aa, Homo sapiens
GISPIFGTVKYAQNFQG

SEQ ID NO: 9942 - protein, 17 aa, Homo sapiens
GISPILRTAVYAQKFQG

SEQ ID NO: 9943 - protein, 17 aa, Homo sapiens
GISPILRTTVYAQKFQG

SEQ ID NO: 9944 - protein, 17 aa, Homo sapiens
GISPMFGPAKYAEKFQG

SEQ ID NO: 9945 - protein, 17 aa, Homo sapiens
GISPMFGPAKYAQKFQG

SEQ ID NO: 9946 - protein, 17 aa, Homo sapiens
GISPMFGTANYAQRFQG

SEQ ID NO: 9947 - protein, 17 aa, Homo sapiens
GISPMFRTANYAQKFQG

SEQ ID NO: 9948 - protein, 17 aa, Homo sapiens
GISSGGGTSYYADSVKG

SEQ ID NO: 9949 - protein, 17 aa, Homo sapiens
GISSSGDTTSYAASVKG

SEQ ID NO: 9950 - protein, 17 aa, Homo sapiens
GISTSGHSTYYADSVKG

SEQ ID NO: 9951 - protein, 7 aa, Homo sapiens
GISTTAA

SEQ ID NO: 9952 - protein, 17 aa, Homo sapiens
GISWDNGAIGYAGFVKG

SEQ ID NO: 9953 - protein, 17 aa, Homo sapiens
GISWDSATKGYADSVKG

SEQ ID NO: 9954 - protein, 17 aa, Homo sapiens
GISWDSGAIGYAASVEG

SEQ ID NO: 9955 - protein, 17 aa, Homo sapiens
GISWDSGAIGYAASVRG

SEQ ID NO: 9956 - protein, 17 aa, Homo sapiens
GISWDSGAIGYADSVKG

SEQ ID NO: 9957 - protein, 17 aa, Homo sapiens
GISWDSGAIGYVASVKG

SEQ ID NO: 9958 - protein, 17 aa, Homo sapiens
GISWDSGSIGYADSVKG

SEQ ID NO: 9959 - protein, 17 aa, Homo sapiens
GISWDSGSIGYAESFKG

SEQ ID NO: 9960 - protein, 17 aa, Homo sapiens
GISWDSGSTEYAESVKG

SEQ ID NO: 9961 - protein, 17 aa, Homo sapiens
GISWNSATIHYVDSVKG

SEQ ID NO: 9962 - protein, 17 aa, Homo sapiens
GISWNSATIVYADSVKG

SEQ ID NO: 9963 - protein, 17 aa, Homo sapiens
GISWNSDKIGYADSVKG

SEQ ID NO: 9964 - protein, 17 aa, Homo sapiens
GISWNSGAIGYAASVKG

SEQ ID NO: 9965 - protein, 17 aa, Homo sapiens
GISWNSGAVGYGDSVEG

SEQ ID NO: 9966 - protein, 17 aa, Homo sapiens
GISWNSGGIGYADSVKG

SEQ ID NO: 9967 - protein, 17 aa, Homo sapiens
GISWNSGRIGYVDSVKG

SEQ ID NO: 9968 - protein, 17 aa, Homo sapiens
GISWNSGSIAYADSVKG

SEQ ID NO: 9969 - protein, 17 aa, Homo sapiens
GISWNSGSIDYADSVKG

SEQ ID NO: 9970 - protein, 17 aa, Homo sapiens
GISWNSGSIGYAASLKG

SEQ ID NO: 9971 - protein, 17 aa, Homo sapiens
GISWNSGSIGYADSVKG

SEQ ID NO: 9972 - protein, 17 aa, Homo sapiens
GISWNSGSIGYADSVRG

SEQ ID NO: 9973 - protein, 17 aa, Homo sapiens
GISWNSGSIGYGDSVKG

SEQ ID NO: 9974 - protein, 17 aa, Homo sapiens
GISWNSIGIGYADSVKG

SEQ ID NO: 9975 - protein, 17 aa, Homo sapiens
GISWNSRTIGYADSVKG

SEQ ID NO: 9976 - protein, 17 aa, Homo sapiens
GISWSSGAIGYADSVRG

SEQ ID NO: 9977 - protein, 17 aa, Homo sapiens
GISWSSGSIGYADSVKG

SEQ ID NO: 9978 - protein, 17 aa, Homo sapiens
GITAIFGTANYAQKFQG

SEQ ID NO: 9979 - protein, 17 aa, Homo sapiens
GITAIFGTTKYAQKFQG

SEQ ID NO: 9980 - protein, 17 aa, Homo sapiens
GITAIFGVPNYAQKFQG

SEQ ID NO: 9981 - protein, 17 aa, Homo sapiens
GITAIFNVPSYAQRFQG

SEQ ID NO: 9982 - protein, 17 aa, Homo sapiens
GITAVFGTTSYAQKFQG

SEQ ID NO: 9983 - protein, 17 aa, Homo sapiens
GITAVFGTTTYAQKFQG

SEQ ID NO: 9984 - protein, 17 aa, Homo sapiens
GITGMFATVHYAQKFQG

SEQ ID NO: 9985 - protein, 17 aa, Homo sapiens
GITGMFGSTNYPQKFQG

SEQ ID NO: 9986 - protein, 17 aa, Homo sapiens
GITGMFGTAKYAQKFQG

SEQ ID NO: 9987 - protein, 17 aa, Homo sapiens
GITGMFGTATYAQKFQG

SEQ ID NO: 9988 - protein, 17 aa, Homo sapiens
GITGMFGTTNYAQKFQG

SEQ ID NO: 9989 - protein, 17 aa, Homo sapiens
GITGMFRTTYYVQKFQG

SEQ ID NO: 9990 - protein, 17 aa, Homo sapiens
GITGVFATANYAQKFQG

SEQ ID NO: 9991 - protein, 17 aa, Homo sapiens
GITGVFGTANHAQKFQG

SEQ ID NO: 9992 - protein, 17 aa, Homo sapiens
GITGVFGTANYAQKFQG

SEQ ID NO: 9993 - protein, 17 aa, Homo sapiens
GITGVFGTTNYAQKFQG

SEQ ID NO: 9994 - protein, 17 aa, Homo sapiens
GITPALGSADHAAKLQG

SEQ ID NO: 9995 - protein, 17 aa, Homo sapiens
GITPIFGTTNYAQKFQG

SEQ ID NO: 9996 - protein, 17 aa, Homo sapiens
GITPIFPLTHVAQQFQG

SEQ ID NO: 9997 - protein, 17 aa, Homo sapiens
GITPMFGTVQYGQKFQG

SEQ ID NO: 9998 - protein, 17 aa, Homo sapiens
GITPMFRTTTYAQKFQG

SEQ ID NO: 9999 - protein, 17 aa, Homo sapiens
GITPMFSITNYAQKFQG

SEQ ID NO: 10000 - protein, 17 aa, Homo sapiens
GITWNSRNIGYGGSVKG

SEQ ID NO: 10001 - protein, 17 aa, Homo sapiens
GIVAIFGAPKNAQKFQG

SEQ ID NO: 10002 - protein, 17 aa, Homo sapiens
GIVAIFRTPKYAQKFHG

SEQ ID NO: 10003 - protein, 17 aa, Homo sapiens
GIVGMFGITKYAQKFQG

SEQ ID NO: 10004 - protein, 17 aa, Homo sapiens
GIVPIFGTANYAQKFQG

SEQ ID NO: 10005 - protein, 17 aa, Homo sapiens
GIVPIFGTPNYAQKFQG

SEQ ID NO: 10006 - protein, 17 aa, Homo sapiens
GIVPIFHTPNYAQNFQG

SEQ ID NO: 10007 - protein, 17 aa, Homo sapiens
GIVPILGIVNNAQKFQG

SEQ ID NO: 10008 - protein, 17 aa, Homo sapiens
GIVPLFGTANYAQRFQG

SEQ ID NO: 10009 - protein, 17 aa, Homo sapiens
GIVPMFGTVKYAQKFQG

SEQ ID NO: 10010 - protein, 17 aa, Homo sapiens
GIVPMFRITNYAQKFQG

SEQ ID NO: 10011 - protein, 17 aa, Homo sapiens
GIVPVFGSSHYAQKFQG

SEQ ID NO: 10012 - protein, 17 aa, Homo sapiens
GIVPVFPAPAYAQKFRG

SEQ ID NO: 10013 - protein, 17 aa, Homo sapiens
GIVPVFPTPNYAQKFQG

SEQ ID NO: 10014 - protein, 14 aa, Homo sapiens
GIWRDDFKYDAFDI

SEQ ID NO: 10015 - protein, 17 aa, Homo sapiens
GIWYDGRNANYADSVKG

SEQ ID NO: 10016 - protein, 17 aa, Homo sapiens
GIWYDGRNKYYADSVKG

SEQ ID NO: 10017 - protein, 16 aa, Homo sapiens
GIYYTGNAYYNPSLKS

SEQ ID NO: 10018 - protein, 11 aa, Homo sapiens
GIYYYLSYLAY

SEQ ID NO: 10019 - protein, 16 aa, Homo sapiens
GKAITIFGLVTSYFDY

SEQ ID NO: 10020 - protein, 7 aa, Homo sapiens
GKDKRPS

SEQ ID NO: 10021 - protein, 15 aa, Homo sapiens
GKEYDGNNYYRPFDF

SEQ ID NO: 10022 - protein, 7 aa, Homo sapiens
GKHKRPS

SEQ ID NO: 10023 - protein, 7 aa, Homo sapiens
GKNDRPS

SEQ ID NO: 10024 - protein, 7 aa, Homo sapiens
GKNNRPS

SEQ ID NO: 10025 - protein, 7 aa, Homo sapiens
GKNQRPS

SEQ ID NO: 10026 - protein, 18 aa, Homo sapiens
GKNYYDSSGPKGGDAFDI

SEQ ID NO: 10027 - protein, 11 aa, Homo sapiens
GKNYYPNYFDF

SEQ ID NO: 10028 - protein, 13 aa, Homo sapiens
GKSWSGGHMGGVY

SEQ ID NO: 10029 - protein, 7 aa, Homo sapiens
GKTNRPS

SEQ ID NO: 10030 - protein, 12 aa, Homo sapiens
GKTYYHDTSHDY

SEQ ID NO: 10031 - protein, 13 aa, Homo sapiens
GKYCSLTTCVFDS

SEQ ID NO: 10032 - protein, 13 aa, Homo sapiens
GKYCSLTTCVFDY

SEQ ID NO: 10033 - protein, 5 aa, Homo sapiens
GKYIH

SEQ ID NO: 10034 - protein, 7 aa, Homo sapiens
GLAAANV

SEQ ID NO: 10035 - protein, 17 aa, Homo sapiens
GLAPGYYGMVGGPPPYY

SEQ ID NO: 10036 - protein, 17 aa, Homo sapiens
GLDPEDGERSYEEKFQG

SEQ ID NO: 10037 - protein, 17 aa, Homo sapiens
GLDPEDGERTYEQKFQG

SEQ ID NO: 10038 - protein, 14 aa, Homo sapiens
GLEGSRSWFRADEI

SEQ ID NO: 10039 - protein, 5 aa, Homo sapiens
GLGDY

SEQ ID NO: 10040 - protein, 17 aa, Homo sapiens
GLIPLFRVPKNAQKFQD

SEQ ID NO: 10041 - protein, 17 aa, Homo sapiens
GLIPVFGTPKYAQKFQG

SEQ ID NO: 10042 - protein, 17 aa, Homo sapiens
GLIPVFRTPKYAQKFQG

SEQ ID NO: 10043 - protein, 17 aa, Homo sapiens
GLISIFRTAEYAQKFQG

SEQ ID NO: 10044 - protein, 11 aa, Homo sapiens
GLKGSGFPANY

SEQ ID NO: 10045 - protein, 15 aa, Homo sapiens
GLLLWFGELSDAFDI

SEQ ID NO: 10046 - protein, 17 aa, Homo sapiens
GLNPLFGIANYAQKFQG

SEQ ID NO: 10047 - protein, 17 aa, Homo sapiens
GLNPLFGIAYYAQDFQG

SEQ ID NO: 10048 - protein, 17 aa, Homo sapiens
GLNPLFGITYYAQDFQG

SEQ ID NO: 10049 - protein, 17 aa, Homo sapiens
GLNPLFKIAHYAQKFQG

SEQ ID NO: 10050 - protein, 17 aa, Homo sapiens
GLNPLFKIANYAQKFQG

SEQ ID NO: 10051 - protein, 17 aa, Homo sapiens
GLNPLFKIPKYSQKFQG

SEQ ID NO: 10052 - protein, 17 aa, Homo sapiens
GLNPLFKITHYAQKFQG

SEQ ID NO: 10053 - protein, 14 aa, Homo sapiens
GLNSGSISTSYYPC

SEQ ID NO: 10054 - protein, 16 aa, Homo sapiens
GLPWDSSNSCYRPIDY

SEQ ID NO: 10055 - protein, 13 aa, Homo sapiens
GLRLLVESGALDM

SEQ ID NO: 10056 - protein, 17 aa, Homo sapiens
GLSGSGASTYYADSVKG

SEQ ID NO: 10057 - protein, 5 aa, Homo sapiens
GLSIH

SEQ ID NO: 10058 - protein, 14 aa, Homo sapiens
GLSSGSVSANNYPS

SEQ ID NO: 10059 - protein, 14 aa, Homo sapiens
GLSSGSVSTSYYPS

SEQ ID NO: 10060 - protein, 12 aa, Homo sapiens
GLSTSAWSPLGF

SEQ ID NO: 10061 - protein, 10 aa, Homo sapiens
GLTTGWSLGY

SEQ ID NO: 10062 - protein, 11 aa, Homo sapiens
GLTYYFNSLDF

SEQ ID NO: 10063 - protein, 15 aa, Homo sapiens
GLYWDGSSCYRSVDW

SEQ ID NO: 10064 - protein, 13 aa, Homo sapiens
GMGYSYVNGASDI

SEQ ID NO: 10065 - protein, 17 aa, Homo sapiens
GMIPIFGAPNYAQKFQG

SEQ ID NO: 10066 - protein, 18 aa, Homo sapiens
GMSDPYCSTRICPSQLDA

SEQ ID NO: 10067 - protein, 17 aa, Homo sapiens
GMSGSSGNTYYADPAKG

SEQ ID NO: 10068 - protein, 16 aa, Homo sapiens
GMSLSVYSGSGMPIDY

SEQ ID NO: 10069 - protein, 7 aa, Homo sapiens
GMTTIDS

SEQ ID NO: 10070 - protein, 11 aa, Homo sapiens
GMTYTVTKFDY

SEQ ID NO: 10071 - protein, 5 aa, Homo sapiens
GNAIS

SEQ ID NO: 10072 - protein, 13 aa, Homo sapiens
GNAYKPTLSHIDS

SEQ ID NO: 10073 - protein, 13 aa, Homo sapiens
GNAYKPTLSHIDY

SEQ ID NO: 10074 - protein, 7 aa, Homo sapiens
GNDQRPS

SEQ ID NO: 10075 - protein, 7 aa, Homo sapiens
GNDYRPS

SEQ ID NO: 10076 - protein, 9 aa, Homo sapiens
GNFVPSLPS

SEQ ID NO: 10077 - protein, 5 aa, Homo sapiens
GNGMH

SEQ ID NO: 10078 - protein, 13 aa, Homo sapiens
GNGYKPSLSHIDF

SEQ ID NO: 10079 - protein, 13 aa, Homo sapiens
GNGYKPTLTHIDY

SEQ ID NO: 10080 - protein, 5 aa, Homo sapiens
GNHMT

SEQ ID NO: 10081 - protein, 7 aa, Homo sapiens
GNHQRPS

SEQ ID NO: 10082 - protein, 19 aa, Homo sapiens
GNHYRYDFLSGSRADWFDP

SEQ ID NO: 10083 - protein, 19 aa, Homo sapiens
GNHYRYDFWSGSRADWLDP

SEQ ID NO: 10084 - protein, 7 aa, Homo sapiens
GNINRPS

SEQ ID NO: 10085 - protein, 17 aa, Homo sapiens
GNIPIFGAAKYAQKFQG

SEQ ID NO: 10086 - protein, 11 aa, Homo sapiens
GNMKGSASYIF

SEQ ID NO: 10087 - protein, 8 aa, Homo sapiens
GNNNQRPS

SEQ ID NO: 10088 - protein, 7 aa, Homo sapiens
GNNNRPS

SEQ ID NO: 10089 - protein, 7 aa, Homo sapiens
GNNQRPS

SEQ ID NO: 10090 - protein, 8 aa, Homo sapiens
GNNSQRPS

SEQ ID NO: 10091 - protein, 10 aa, Homo sapiens
GNPSYNWFDP

SEQ ID NO: 10092 - protein, 7 aa, Homo sapiens
GNSHRPS

SEQ ID NO: 10093 - protein, 6 aa, Homo sapiens
GNSLPS

SEQ ID NO: 10094 - protein, 7 aa, Homo sapiens
GNSNRPS

SEQ ID NO: 10095 - protein, 6 aa, Homo sapiens
GNSPPS

SEQ ID NO: 10096 - protein, 7 aa, Homo sapiens
GNSQRPS

SEQ ID NO: 10097 - protein, 7 aa, Homo sapiens
GNTNRPS

SEQ ID NO: 10098 - protein, 11 aa, Homo sapiens
GNVGYGDYFDS

SEQ ID NO: 10099 - protein, 16 aa, Homo sapiens
GNYDILTGYYKGWFDL

SEQ ID NO: 10100 - protein, 5 aa, Homo sapiens
GNYVH

SEQ ID NO: 10101 - protein, 5 aa, Homo sapiens
GNYWS

SEQ ID NO: 10102 - protein, 7 aa, Homo sapiens
GPATRAT

SEQ ID NO: 10103 - protein, 18 aa, Homo sapiens
GPDDFDIEKGYSINWFDP

SEQ ID NO: 10104 - protein, 18 aa, Homo sapiens
GPDDYDVLTGYSTNWFDP

SEQ ID NO: 10105 - protein, 19 aa, Homo sapiens
GPFYYYDSSGYPDLDAFDI

SEQ ID NO: 10106 - protein, 15 aa, Homo sapiens
GPGMATIAEYLRFDY

SEQ ID NO: 10107 - protein, 11 aa, Homo sapiens
GPHYYNSYMDV

SEQ ID NO: 10108 - protein, 11 aa, Homo sapiens
GPHYYSDYLDV

SEQ ID NO: 10109 - protein, 11 aa, Homo sapiens
GPHYYSSYIDV

SEQ ID NO: 10110 - protein, 11 aa, Homo sapiens
GPKYYYYYMDV

SEQ ID NO: 10111 - protein, 17 aa, Homo sapiens
GPLCNSTTCPTDDAFDI

SEQ ID NO: 10112 - protein, 19 aa, Homo sapiens
GPLDYDILAGYYKGLGFDY

SEQ ID NO: 10113 - protein, 19 aa, Homo sapiens
GPLDYDILTGYFKGLGFDY

SEQ ID NO: 10114 - protein, 19 aa, Homo sapiens
GPLDYDVLTGYYKGLGFDY

SEQ ID NO: 10115 - protein, 7 aa, Homo sapiens
GPNSYWV

SEQ ID NO: 10116 - protein, 11 aa, Homo sapiens
GPNTAYSHFDS

SEQ ID NO: 10117 - protein, 14 aa, Homo sapiens
GPNTDVYYHSGMAV

SEQ ID NO: 10118 - protein, 13 aa, Homo sapiens
GPNYHDIVTYFDP

SEQ ID NO: 10119 - protein, 13 aa, Homo sapiens
GPNYHDTNSYLDP

SEQ ID NO: 10120 - protein, 13 aa, Homo sapiens
GPNYHDTNTYFDP

SEQ ID NO: 10121 - protein, 13 aa, Homo sapiens
GPNYHDTNTYLDP

SEQ ID NO: 10122 - protein, 13 aa, Homo sapiens
GPNYHDTTGYFDP

SEQ ID NO: 10123 - protein, 13 aa, Homo sapiens
GPNYHDTTSYFDP

SEQ ID NO: 10124 - protein, 13 aa, Homo sapiens
GPNYHDTTSYFDS

SEQ ID NO: 10125 - protein, 13 aa, Homo sapiens
GPNYHDTTTYFDP

SEQ ID NO: 10126 - protein, 13 aa, Homo sapiens
GPNYHDTTTYFVS

SEQ ID NO: 10127 - protein, 13 aa, Homo sapiens
GPNYHDTTTYLDP

SEQ ID NO: 10128 - protein, 13 aa, Homo sapiens
GPNYHDTTTYYDP

SEQ ID NO: 10129 - protein, 11 aa, Homo sapiens
GPNYYETYFDL

SEQ ID NO: 10130 - protein, 14 aa, Homo sapiens
GPPGNYYGSGSYAD

SEQ ID NO: 10131 - protein, 18 aa, Homo sapiens
GPPKRKTIFEEVFKWFDP

SEQ ID NO: 10132 - protein, 15 aa, Homo sapiens
GPPRRTYYGSGKFDY

SEQ ID NO: 10133 - protein, 14 aa, Homo sapiens
GPRRGYGSGSYYGY

SEQ ID NO: 10134 - protein, 13 aa, Homo sapiens
GPRVSFSPANFAF

SEQ ID NO: 10135 - protein, 11 aa, Homo sapiens
GPSKLWTKFDY

SEQ ID NO: 10136 - protein, 13 aa, Homo sapiens
GPSYEFWSGYFHY

SEQ ID NO: 10137 - protein, 18 aa, Homo sapiens
GPTDFDIEAGYKEHYLDY

SEQ ID NO: 10138 - protein, 18 aa, Homo sapiens
GPTDFDILTGYSETYIDY

SEQ ID NO: 10139 - protein, 18 aa, Homo sapiens
GPTNFDILTGYKESYFDY

SEQ ID NO: 10140 - protein, 18 aa, Homo sapiens
GPTNYDILTGYQEHYFDY

SEQ ID NO: 10141 - protein, 7 aa, Homo sapiens
GPTTFDY

SEQ ID NO: 10142 - protein, 15 aa, Homo sapiens
GPTYYEHSDYFPGDS

SEQ ID NO: 10143 - protein, 11 aa, Homo sapiens
GPTYYNSYMDV

SEQ ID NO: 10144 - protein, 11 aa, Homo sapiens
GPTYYYNYMDV

SEQ ID NO: 10145 - protein, 18 aa, Homo sapiens
GPVDYDIETGYLDYGMDV

SEQ ID NO: 10146 - protein, 18 aa, Homo sapiens
GPVDYDILTGYLDYGMDV

SEQ ID NO: 10147 - protein, 18 aa, Homo sapiens
GPVDYDILTGYVDYGMDV

SEQ ID NO: 10148 - protein, 6 aa, Homo sapiens
GPWGNV

SEQ ID NO: 10149 - protein, 7 aa, Homo sapiens
GPWTLDY

SEQ ID NO: 10150 - protein, 11 aa, Homo sapiens
GPYYYHSYMDV

SEQ ID NO: 10151 - protein, 11 aa, Homo sapiens
GPYYYHYYMDV

SEQ ID NO: 10152 - protein, 5 aa, Homo sapiens
GQFLH

SEQ ID NO: 10153 - protein, 14 aa, Homo sapiens
GQGRPITGTGILDS

SEQ ID NO: 10154 - protein, 16 aa, Homo sapiens
GQLWDKSVTFYRPLES

SEQ ID NO: 10155 - protein, 16 aa, Homo sapiens
GQLWDRSVTFYRPLES

SEQ ID NO: 10156 - protein, 19 aa, Homo sapiens
GQNPRRTSIFEVVPQGFDP

SEQ ID NO: 10157 - protein, 13 aa, Homo sapiens
GQSTVPSTGWFDP

SEQ ID NO: 10158 - protein, 11 aa, Homo sapiens
GQTYHHNYLEV

SEQ ID NO: 10159 - protein, 11 aa, Homo sapiens
GQTYYFSHMDV

SEQ ID NO: 10160 - protein, 11 aa, Homo sapiens
GQTYYLNYMEV

SEQ ID NO: 10161 - protein, 10 aa, Homo sapiens
GQWLAPLGNL

SEQ ID NO: 10162 - protein, 10 aa, Homo sapiens
GQYNHYTSYA

SEQ ID NO: 10163 - protein, 5 aa, Homo sapiens
GQYWS

SEQ ID NO: 10164 - protein, 18 aa, Homo sapiens
GQYYYDSSGYYSYWYFDL

SEQ ID NO: 10165 - protein, 18 aa, Homo sapiens
GREPYYDFWSALMGPMGY

SEQ ID NO: 10166 - protein, 12 aa, Homo sapiens
GRGHPTEGWFDP

SEQ ID NO: 10167 - protein, 14 aa, Homo sapiens
GRGLSYFYGSGFAY

SEQ ID NO: 10168 - protein, 15 aa, Homo sapiens
GRGRVVATEYNWFEP

SEQ ID NO: 10169 - protein, 11 aa, Homo sapiens
GRGYYENEFDY

SEQ ID NO: 10170 - protein, 17 aa, Homo sapiens
GRIAGTKSAHYYYGMDV

SEQ ID NO: 10171 - protein, 14 aa, Homo sapiens
GRNCNAYNCHVLND

SEQ ID NO: 10172 - protein, 8 aa, Homo sapiens
GRQPPFDF

SEQ ID NO: 10173 - protein, 14 aa, Homo sapiens
GRRGAESYFEPSKN

SEQ ID NO: 10174 - protein, 13 aa, Homo sapiens
GRRGPFEDGWFDT

SEQ ID NO: 10175 - protein, 13 aa, Homo sapiens
GRRGSVVVAATDY

SEQ ID NO: 10176 - protein, 17 aa, Homo sapiens
GRRPGDESGGYYSWFDS

SEQ ID NO: 10177 - protein, 13 aa, Homo sapiens
GRSPGIVILPEDV

SEQ ID NO: 10178 - protein, 11 aa, Homo sapiens
GRSSWYLYFDY

SEQ ID NO: 10179 - protein, 7 aa, Homo sapiens
GRSTYWG

SEQ ID NO: 10180 - protein, 14 aa, Homo sapiens
GRTDYGGNSYAFDI

SEQ ID NO: 10181 - protein, 18 aa, Homo sapiens
GRTMSRGFSPATPTNFDY

SEQ ID NO: 10182 - protein, 12 aa, Homo sapiens
GRTYYEKGYFEY

SEQ ID NO: 10183 - protein, 16 aa, Homo sapiens
GRVLRYFDWLLEPFDF

SEQ ID NO: 10184 - protein, 18 aa, Homo sapiens
GRWYYDSSGSFRRANFDY

SEQ ID NO: 10185 - protein, 14 aa, Homo sapiens
GRYRGDWTVDTLHF

SEQ ID NO: 10186 - protein, 6 aa, Homo sapiens
GSAFDI

SEQ ID NO: 10187 - protein, 5 aa, Homo sapiens
GSAIN

SEQ ID NO: 10188 - protein, 5 aa, Homo sapiens
GSAIS

SEQ ID NO: 10189 - protein, 16 aa, Homo sapiens
GSATTVTPYYSFGMDV

SEQ ID NO: 10190 - protein, 5 aa, Homo sapiens
GSDIN

SEQ ID NO: 10191 - protein, 12 aa, Homo sapiens
GSDYYGRSPLDV

SEQ ID NO: 10192 - protein, 11 aa, Homo sapiens
GSETSSYCFDP

SEQ ID NO: 10193 - protein, 21 aa, Homo sapiens
GSGGYYGSGSYYDYYYYGMDV

SEQ ID NO: 10194 - protein, 12 aa, Homo sapiens
GSGLVGPTPFDY

SEQ ID NO: 10195 - protein, 13 aa, Homo sapiens
GSGSGWLGDYFDY

SEQ ID NO: 10196 - protein, 13 aa, Homo sapiens
GSGSYLTYNWFDP

SEQ ID NO: 10197 - protein, 11 aa, Homo sapiens
GSGSYPRHFDY

SEQ ID NO: 10198 - protein, 9 aa, Homo sapiens
GSGWFGEFH

SEQ ID NO: 10199 - protein, 12 aa, Homo sapiens
GSGYHFKFPFDY

SEQ ID NO: 10200 - protein, 13 aa, Homo sapiens
GSGYHFSTGALDQ

SEQ ID NO: 10201 - protein, 12 aa, Homo sapiens
GSGYHILNPFDI

SEQ ID NO: 10202 - protein, 11 aa, Homo sapiens
GSGYKYEYFQS

SEQ ID NO: 10203 - protein, 11 aa, Homo sapiens
GSGYQPDFFQN

SEQ ID NO: 10204 - protein, 11 aa, Homo sapiens
GSGYYHNYFEY

SEQ ID NO: 10205 - protein, 7 aa, Homo sapiens
GSHQRPS

SEQ ID NO: 10206 - protein, 12 aa, Homo sapiens
GSHYYVGGWFDP

SEQ ID NO: 10207 - protein, 17 aa, Homo sapiens
GSIPFLGTPKYAQKFRG

SEQ ID NO: 10208 - protein, 13 aa, Homo sapiens
GSITWPTEYYLDY

SEQ ID NO: 10209 - protein, 9 aa, Homo sapiens
GSLGGPLDY

SEQ ID NO: 10210 - protein, 13 aa, Homo sapiens
GSLYSSSWYYFDY

SEQ ID NO: 10211 - protein, 17 aa, Homo sapiens
GSNPIFGSANYAQKFQG

SEQ ID NO: 10212 - protein, 7 aa, Homo sapiens
GSNYYWG

SEQ ID NO: 10213 - protein, 13 aa, Homo sapiens
GSPISGDPTGFDH

SEQ ID NO: 10214 - protein, 14 aa, Homo sapiens
GSRDQYYNYYGMDV

SEQ ID NO: 10215 - protein, 14 aa, Homo sapiens
GSRGAESYFEFFKY

SEQ ID NO: 10216 - protein, 13 aa, Homo sapiens
GSRITGANVASDI

SEQ ID NO: 10217 - protein, 9 aa, Homo sapiens
GSRLGIPDS

SEQ ID NO: 10218 - protein, 13 aa, Homo sapiens
GSSGWYGGNVFDI

SEQ ID NO: 10219 - protein, 11 aa, Homo sapiens
GSSGWYNAFDI

SEQ ID NO: 10220 - protein, 16 aa, Homo sapiens
GSSQSLVHRDGNTYLN

SEQ ID NO: 10221 - protein, 12 aa, Homo sapiens
GSSRSGSYYFDS

SEQ ID NO: 10222 - protein, 7 aa, Homo sapiens
GSSSRAT

SEQ ID NO: 10223 - protein, 14 aa, Homo sapiens
GSSTGAVTSGHYPY

SEQ ID NO: 10224 - protein, 7 aa, Homo sapiens
GSSTRAA

SEQ ID NO: 10225 - protein, 7 aa, Homo sapiens
GSSTRAT

SEQ ID NO: 10226 - protein, 10 aa, Homo sapiens
GSSTSWGFDY

SEQ ID NO: 10227 - protein, 5 aa, Homo sapiens
GSTIH

SEQ ID NO: 10228 - protein, 7 aa, Homo sapiens
GSTLLDY

SEQ ID NO: 10229 - protein, 7 aa, Homo sapiens
GSTNRPS

SEQ ID NO: 10230 - protein, 7 aa, Homo sapiens
GSTSRPT

SEQ ID NO: 10231 - protein, 14 aa, Homo sapiens
GSTTGPVTSGHYPY

SEQ ID NO: 10232 - protein, 11 aa, Homo sapiens
GSTYYPSYFDS

SEQ ID NO: 10233 - protein, 5 aa, Homo sapiens
GSVIH

SEQ ID NO: 10234 - protein, 18 aa, Homo sapiens
GSVTSDFWSAYFPNGMDV

SEQ ID NO: 10235 - protein, 11 aa, Homo sapiens
GSYAGSNNLKV

SEQ ID NO: 10236 - protein, 14 aa, Homo sapiens
GSYDSSGSPGAFDI

SEQ ID NO: 10237 - protein, 10 aa, Homo sapiens
GSYSRSGTFV

SEQ ID NO: 10238 - protein, 15 aa, Homo sapiens
GTDEWERRNYYYMDV

SEQ ID NO: 10239 - protein, 11 aa, Homo sapiens
GTDSAATRVDA

SEQ ID NO: 10240 - protein, 14 aa, Homo sapiens
GTEGSMYYNFHFDY

SEQ ID NO: 10241 - protein, 7 aa, Homo sapiens
GTFIRAS

SEQ ID NO: 10242 - protein, 13 aa, Homo sapiens
GTGYSSGWFETDH

SEQ ID NO: 10243 - protein, 13 aa, Homo sapiens
GTGYSSGWFETDY

SEQ ID NO: 10244 - protein, 7 aa, Homo sapiens
GTHIRAS

SEQ ID NO: 10245 - protein, 14 aa, Homo sapiens
GTHYDSISYYGMDV

SEQ ID NO: 10246 - protein, 19 aa, Homo sapiens
GTHYRYDFLSGSRADWLDI

SEQ ID NO: 10247 - protein, 19 aa, Homo sapiens
GTHYRYDFWSGSRADWFDP

SEQ ID NO: 10248 - protein, 17 aa, Homo sapiens
GTIPIFGTPKYAQKFQG

SEQ ID NO: 10249 - protein, 17 aa, Homo sapiens
GTIPIFGTPKYAQSFQG

SEQ ID NO: 10250 - protein, 17 aa, Homo sapiens
GTIPLFGVAKYAVKFQG

SEQ ID NO: 10251 - protein, 17 aa, Homo sapiens
GTIPVLGIVNYAQKFQG

SEQ ID NO: 10252 - protein, 17 aa, Homo sapiens
GTKMDYDTYGYYYFFDY

SEQ ID NO: 10253 - protein, 11 aa, Homo sapiens
GTLDFDWFLGY

SEQ ID NO: 10254 - protein, 17 aa, Homo sapiens
GTLPIFGTANYAQKFQG

SEQ ID NO: 10255 - protein, 15 aa, Homo sapiens
GTLWFGEDPLDAFDI

SEQ ID NO: 10256 - protein, 17 aa, Homo sapiens
GTMPLFGTPIYAQKFQD

SEQ ID NO: 10257 - protein, 6 aa, Homo sapiens
GTNWWS

SEQ ID NO: 10258 - protein, 14 aa, Homo sapiens
GTPDDILTGYHCDY

SEQ ID NO: 10259 - protein, 20 aa, Homo sapiens
GTPEIGGAGIWSYYYYYMDV

SEQ ID NO: 10260 - protein, 14 aa, Homo sapiens
GTPQGRQWLVNFDY

SEQ ID NO: 10261 - protein, 7 aa, Homo sapiens
GTSNRAT

SEQ ID NO: 10262 - protein, 7 aa, Homo sapiens
GTSSRAT

SEQ ID NO: 10263 - protein, 7 aa, Homo sapiens
GTSTLQS

SEQ ID NO: 10264 - protein, 7 aa, Homo sapiens
GTSTRAT

SEQ ID NO: 10265 - protein, 12 aa, Homo sapiens
GTTDIVSTIIDY

SEQ ID NO: 10266 - protein, 16 aa, Homo sapiens
GTTIFGVLIISNPFDY

SEQ ID NO: 10267 - protein, 22 aa, Homo sapiens
GTVVVVPAAIPPTSYYYYYMDV

SEQ ID NO: 10268 - protein, 11 aa, Homo sapiens
GTWDRSLSAVV

SEQ ID NO: 10269 - protein, 11 aa, Homo sapiens
GTWDRSLTAVA

SEQ ID NO: 10270 - protein, 11 aa, Homo sapiens
GTWDSRLSAGV

SEQ ID NO: 10271 - protein, 11 aa, Homo sapiens
GTWDSSLNTGV

SEQ ID NO: 10272 - protein, 11 aa, Homo sapiens
GTWDSSLRAGV

SEQ ID NO: 10273 - protein, 11 aa, Homo sapiens
GTWDSSLRAVV

SEQ ID NO: 10274 - protein, 14 aa, Homo sapiens
GTWDSSLSAGLNSV

SEQ ID NO: 10275 - protein, 13 aa, Homo sapiens
GTWDSSLSAGRVV

SEQ ID NO: 10276 - protein, 11 aa, Homo sapiens
GTWDSSLSAGV

SEQ ID NO: 10277 - protein, 12 aa, Homo sapiens
GTWDSSLSALWV

SEQ ID NO: 10278 - protein, 11 aa, Homo sapiens
GTWDSSLSAVV

SEQ ID NO: 10279 - protein, 12 aa, Homo sapiens
GTWDSSLSAVWV

SEQ ID NO: 10280 - protein, 12 aa, Homo sapiens
GTWDSSPGAHWV

SEQ ID NO: 10281 - protein, 11 aa, Homo sapiens
GTWDTNLSAGV

SEQ ID NO: 10282 - protein, 11 aa, Homo sapiens
GTWDTSLNGGL

SEQ ID NO: 10283 - protein, 12 aa, Homo sapiens
GTWDTSLSAGVV

SEQ ID NO: 10284 - protein, 11 aa, Homo sapiens
GTWDTSPNSGL

SEQ ID NO: 10285 - protein, 12 aa, Homo sapiens
GTWNSGLSAGRV

SEQ ID NO: 10286 - protein, 16 aa, Homo sapiens
GTYYYDSSDRGDAFDI

SEQ ID NO: 10287 - protein, 13 aa, Homo sapiens
GVEMTISGWYFDL

SEQ ID NO: 10288 - protein, 12 aa, Homo sapiens
GVGATAFYAFDN

SEQ ID NO: 10289 - protein, 12 aa, Homo sapiens
GVGFPHYYYMDV

SEQ ID NO: 10290 - protein, 13 aa, Homo sapiens
GVGGWLSYWYFDL

SEQ ID NO: 10291 - protein, 15 aa, Homo sapiens
GVGMRLLEWLNWLDS

SEQ ID NO: 10292 - protein, 12 aa, Homo sapiens
GVGVMGSIPIDP

SEQ ID NO: 10293 - protein, 9 aa, Homo sapiens
GVGWEQTDY

SEQ ID NO: 10294 - protein, 17 aa, Homo sapiens
GVIGLFGTAKYAQKFQG

SEQ ID NO: 10295 - protein, 17 aa, Homo sapiens
GVIPIFGTAKYARKFQD

SEQ ID NO: 10296 - protein, 17 aa, Homo sapiens
GVIPIFGTVNYAQKFQG

SEQ ID NO: 10297 - protein, 17 aa, Homo sapiens
GVIPMFGTPNYAQKFQG

SEQ ID NO: 10298 - protein, 15 aa, Homo sapiens
GVITMVRGDYYGMDV

SEQ ID NO: 10299 - protein, 15 aa, Homo sapiens
GVKIFGVARPNWFDP

SEQ ID NO: 10300 - protein, 17 aa, Homo sapiens
GVLAIFGTIKYAQKFQG

SEQ ID NO: 10301 - protein, 18 aa, Homo sapiens
GVLGPITIFGVAQDAFDI

SEQ ID NO: 10302 - protein, 12 aa, Homo sapiens
GVMNFGVIILES

SEQ ID NO: 10303 - protein, 17 aa, Homo sapiens
GVMPLFGTTNYAQRFQG

SEQ ID NO: 10304 - protein, 17 aa, Homo sapiens
GVMPLFRSTKYAQKFQG

SEQ ID NO: 10305 - protein, 7 aa, Homo sapiens
GVNNRPS

SEQ ID NO: 10306 - protein, 7 aa, Homo sapiens
GVNYYWS

SEQ ID NO: 10307 - protein, 15 aa, Homo sapiens
GVRGSYPDLTFYFDY

SEQ ID NO: 10308 - protein, 15 aa, Homo sapiens
GVRRDDYYYYYYMDV

SEQ ID NO: 10309 - protein, 13 aa, Homo sapiens
GVSDAYNSYAFDI

SEQ ID NO: 10310 - protein, 7 aa, Homo sapiens
GVSIRAD

SEQ ID NO: 10311 - protein, 7 aa, Homo sapiens
GVSKRPS

SEQ ID NO: 10312 - protein, 17 aa, Homo sapiens
GVSPMFGTTNYAQKFQG

SEQ ID NO: 10313 - protein, 7 aa, Homo sapiens
GVSSLQS

SEQ ID NO: 10314 - protein, 7 aa, Homo sapiens
GVSSRAT

SEQ ID NO: 10315 - protein, 10 aa, Homo sapiens
GVSSVVANDY

SEQ ID NO: 10316 - protein, 7 aa, Homo sapiens
GVSTRAT

SEQ ID NO: 10317 - protein, 17 aa, Homo sapiens
GVSVSGGSTYYADSVKG

SEQ ID NO: 10318 - protein, 17 aa, Homo sapiens
GVTALFGTTNYAQNFQG

SEQ ID NO: 10319 - protein, 17 aa, Homo sapiens
GVTGMFGTAKYAQKFQG

SEQ ID NO: 10320 - protein, 7 aa, Homo sapiens
GVTNRPS

SEQ ID NO: 10321 - protein, 12 aa, Homo sapiens
GVTYHYTSGLDY

SEQ ID NO: 10322 - protein, 13 aa, Homo sapiens
GVVVTAITHYFDY

SEQ ID NO: 10323 - protein, 16 aa, Homo sapiens
GVYDILTGYVDFGMDV

SEQ ID NO: 10324 - protein, 16 aa, Homo sapiens
GVYYTGSTYYNPSLKS

SEQ ID NO: 10325 - protein, 23 aa, Homo sapiens
GWKEELGGSPGSVGGHYYYAFNV

SEQ ID NO: 10326 - protein, 14 aa, Homo sapiens
GWNDFGCCEDAFDI

SEQ ID NO: 10327 - protein, 14 aa, Homo sapiens
GWNDYGCCEDAFDI

SEQ ID NO: 10328 - protein, 23 aa, Homo sapiens
GWREQLAGMASSSVGHYYYGMHV

SEQ ID NO: 10329 - protein, 23 aa, Homo sapiens
GWREQLGGMGGSHVGHYYYGMDV

SEQ ID NO: 10330 - protein, 17 aa, Homo sapiens
GWRPRDESDGFYSWFDP

SEQ ID NO: 10331 - protein, 17 aa, Homo sapiens
GWRPRDESGGYYSWFDP

SEQ ID NO: 10332 - protein, 17 aa, Homo sapiens
GWRPRDETSGYYSWVDS

SEQ ID NO: 10333 - protein, 17 aa, Homo sapiens
GWRPRQESGGFYSWFDS

SEQ ID NO: 10334 - protein, 17 aa, Homo sapiens
GWRRRDESGGFYSWFDA

SEQ ID NO: 10335 - protein, 5 aa, Homo sapiens
GYAFS

SEQ ID NO: 10336 - protein, 5 aa, Homo sapiens
GYAIN

SEQ ID NO: 10337 - protein, 5 aa, Homo sapiens
GYAIS

SEQ ID NO: 10338 - protein, 5 aa, Homo sapiens
GYAIT

SEQ ID NO: 10339 - protein, 5 aa, Homo sapiens
GYAMH

SEQ ID NO: 10340 - protein, 5 aa, Homo sapiens
GYAMN

SEQ ID NO: 10341 - protein, 18 aa, Homo sapiens
GYCSRTSCYKRGGTYFDY

SEQ ID NO: 10342 - protein, 14 aa, Homo sapiens
GYCSSTHCYGYFDL

SEQ ID NO: 10343 - protein, 14 aa, Homo sapiens
GYDILTAYYKQFDY

SEQ ID NO: 10344 - protein, 5 aa, Homo sapiens
GYELN

SEQ ID NO: 10345 - protein, 18 aa, Homo sapiens
GYFDILTPYSNQHDAFDV

SEQ ID NO: 10346 - protein, 13 aa, Homo sapiens
GYFESSGYRPYDF

SEQ ID NO: 10347 - protein, 5 aa, Homo sapiens
GYFVH

SEQ ID NO: 10348 - protein, 5 aa, Homo sapiens
GYFWS

SEQ ID NO: 10349 - protein, 5 aa, Homo sapiens
GYFWY

SEQ ID NO: 10350 - protein, 5 aa, Homo sapiens
GYGIT

SEQ ID NO: 10351 - protein, 5 aa, Homo sapiens
GYGMH

SEQ ID NO: 10352 - protein, 5 aa, Homo sapiens
GYRIH

SEQ ID NO: 10353 - protein, 5 aa, Homo sapiens
GYSIH

SEQ ID NO: 10354 - protein, 5 aa, Homo sapiens
GYSIT

SEQ ID NO: 10355 - protein, 5 aa, Homo sapiens
GYSMN

SEQ ID NO: 10356 - protein, 5 aa, Homo sapiens
GYSMS

SEQ ID NO: 10357 - protein, 10 aa, Homo sapiens
GYSSGWSLGY

SEQ ID NO: 10358 - protein, 18 aa, Homo sapiens
GYSTLWFGEFLTPYFFDS

SEQ ID NO: 10359 - protein, 5 aa, Homo sapiens
GYVMS

SEQ ID NO: 10360 - protein, 18 aa, Homo sapiens
GYVTHDFWSNYFPYGMDV

SEQ ID NO: 10361 - protein, 18 aa, Homo sapiens
GYVTQDFWSNYFPYGMDV

SEQ ID NO: 10362 - protein, 5 aa, Homo sapiens
GYWMS

SEQ ID NO: 10363 - protein, 5 aa, Homo sapiens
GYWMT

SEQ ID NO: 10364 - protein, 5 aa, Homo sapiens
GYYCS

SEQ ID NO: 10365 - protein, 5 aa, Homo sapiens
GYYIH

SEQ ID NO: 10366 - protein, 5 aa, Homo sapiens
GYYLH

SEQ ID NO: 10367 - protein, 5 aa, Homo sapiens
GYYMH

SEQ ID NO: 10368 - protein, 5 aa, Homo sapiens
GYYWS

SEQ ID NO: 10369 - protein, 20 aa, Homo sapiens
HAATIFGLLRPPDYYFCMDL

SEQ ID NO: 10370 - protein, 7 aa, Homo sapiens
HASSLES

SEQ ID NO: 10371 - protein, 12 aa, Homo sapiens
HDEPLWSPYFDY

SEQ ID NO: 10372 - protein, 12 aa, Homo sapiens
HDGIRPWDPIDS

SEQ ID NO: 10373 - protein, 12 aa, Homo sapiens
HDGIRPWDPIDY

SEQ ID NO: 10374 - protein, 20 aa, Homo sapiens
HEARVGVIRVDVVSGHWFDP

SEQ ID NO: 10375 - protein, 8 aa, Homo sapiens
HESAMVDY

SEQ ID NO: 10376 - protein, 5 aa, Homo sapiens
HFGMT

SEQ ID NO: 10377 - protein, 15 aa, Homo sapiens
HFPDYFGSVYDAFDI

SEQ ID NO: 10378 - protein, 20 aa, Homo sapiens
HGGATMIVVVAEWAAQYFQH

SEQ ID NO: 10379 - protein, 12 aa, Homo sapiens
HGGYHFTTHFDY

SEQ ID NO: 10380 - protein, 13 aa, Homo sapiens
HGGYHYNYNAMED

SEQ ID NO: 10381 - protein, 11 aa, Homo sapiens
HGGYSGNAFDL

SEQ ID NO: 10382 - protein, 13 aa, Homo sapiens
HGYIARDHYGMDV

SEQ ID NO: 10383 - protein, 12 aa, Homo sapiens
HHHPRWWEVIDY

SEQ ID NO: 10384 - protein, 5 aa, Homo sapiens
HHWMT

SEQ ID NO: 10385 - protein, 9 aa, Homo sapiens
HHYDTSTST

SEQ ID NO: 10386 - protein, 9 aa, Homo sapiens
HHYNNWLPT

SEQ ID NO: 10387 - protein, 16 aa, Homo sapiens
HIDYRGWTDYNPSLKN

SEQ ID NO: 10388 - protein, 16 aa, Homo sapiens
HIFSGDDVSYSTSLRN

SEQ ID NO: 10389 - protein, 16 aa, Homo sapiens
HIFSGDEKSYSTSLKR

SEQ ID NO: 10390 - protein, 16 aa, Homo sapiens
HIFSNDEKSYSTSLKS

SEQ ID NO: 10391 - protein, 16 aa, Homo sapiens
HIFSNGETSYSTSLKT

SEQ ID NO: 10392 - protein, 16 aa, Homo sapiens
HIFSSGEKSYNTSLKT

SEQ ID NO: 10393 - protein, 16 aa, Homo sapiens
HIFSSGEKSYSTSLKT

SEQ ID NO: 10394 - protein, 13 aa, Homo sapiens
HIHNANSWYLGDF

SEQ ID NO: 10395 - protein, 17 aa, Homo sapiens
HINRDGSEKYHVDSIKG

SEQ ID NO: 10396 - protein, 17 aa, Homo sapiens
HINRDGSETYHVDSVKG

SEQ ID NO: 10397 - protein, 17 aa, Homo sapiens
HINSDGSSTRYADSVKG

SEQ ID NO: 10398 - protein, 17 aa, Homo sapiens
HINSDGSSTSYADSVKG

SEQ ID NO: 10399 - protein, 17 aa, Homo sapiens
HIREDGSEKAYVDAVKG

SEQ ID NO: 10400 - protein, 17 aa, Homo sapiens
HIRGDGSSTNYADSVKG

SEQ ID NO: 10401 - protein, 19 aa, Homo sapiens
HIRSKADGGKTDFAAPLKG

SEQ ID NO: 10402 - protein, 19 aa, Homo sapiens
HIRSKFSSYATAYGVSVKG

SEQ ID NO: 10403 - protein, 17 aa, Homo sapiens
HISASGLSTYYADSVKG

SEQ ID NO: 10404 - protein, 17 aa, Homo sapiens
HISDSGYSTYYADSVKG

SEQ ID NO: 10405 - protein, 17 aa, Homo sapiens
HISGGGTITYYADSVKG

SEQ ID NO: 10406 - protein, 17 aa, Homo sapiens
HISGSGISTYYADSVKG

SEQ ID NO: 10407 - protein, 17 aa, Homo sapiens
HISGSGLSRYYADSVKG

SEQ ID NO: 10408 - protein, 17 aa, Homo sapiens
HISGSGLSTYYADSVKG

SEQ ID NO: 10409 - protein, 17 aa, Homo sapiens
HISHSSKRIYYADSVKG

SEQ ID NO: 10410 - protein, 17 aa, Homo sapiens
HISKSSSHTNYADSVKG

SEQ ID NO: 10411 - protein, 17 aa, Homo sapiens
HISSSGSTTYYADSVKG

SEQ ID NO: 10412 - protein, 16 aa, Homo sapiens
HISTTGSTKYNPSLKS

SEQ ID NO: 10413 - protein, 16 aa, Homo sapiens
HIYDSGDTYSNPSLKS

SEQ ID NO: 10414 - protein, 16 aa, Homo sapiens
HIYWNDNKHYSPSLKS

SEQ ID NO: 10415 - protein, 13 aa, Homo sapiens
HIYYGNNWYLGDL

SEQ ID NO: 10416 - protein, 12 aa, Homo sapiens
HKNGQWLVTFDY

SEQ ID NO: 10417 - protein, 12 aa, Homo sapiens
HKNYYDRSGLDY

SEQ ID NO: 10418 - protein, 17 aa, Homo sapiens
HLAAAGTGGYYYYYMDV

SEQ ID NO: 10419 - protein, 96 aa, Homo sapiens
HLEESGGGLVQPGGSLRLSCVGSGFTFSKYWMNWVRQAPGRGLEWVANIKQDGSETFYGDSVKGRFAISRDNARNSLYLQLNSLRAEDTALYYCAR

SEQ ID NO: 10420 - protein, 129 aa, Homo sapiens
HLEESGGGLVQPGGSLRLSCVGSGFTFSKYWMNWVRQAPGRGLEWVANIKQDGSETFYGDSVKGRFAISRDNARNSLYLQLNSLRAEDTALYYCARIRDRLRDGDDDDYLGPYDAFDIWGQGTMVTVSS

SEQ ID NO: 10421 - protein, 18 aa, Homo sapiens
HLRMIMFGGVIAQDAFDI

SEQ ID NO: 10422 - protein, 16 aa, Homo sapiens
HMYTSGLANYDPSLKS

SEQ ID NO: 10423 - protein, 5 aa, Homo sapiens
HNAMS

SEQ ID NO: 10424 - protein, 12 aa, Homo sapiens
HNDYYGSGSYYD

SEQ ID NO: 10425 - protein, 14 aa, Homo sapiens
HNRAGGYYWDFFHP

SEQ ID NO: 10426 - protein, 20 aa, Homo sapiens
HPETFYYYDSSRGKRDAFAI

SEQ ID NO: 10427 - protein, 11 aa, Homo sapiens
HPFRIRLGLEN

SEQ ID NO: 10428 - protein, 11 aa, Homo sapiens
HPFRIRLGLET

SEQ ID NO: 10429 - protein, 10 aa, Homo sapiens
HPGSGTANDY

SEQ ID NO: 10430 - protein, 12 aa, Homo sapiens
HPIIIGSIDFDF

SEQ ID NO: 10431 - protein, 13 aa, Homo sapiens
HPKYHYENSALDY

SEQ ID NO: 10432 - protein, 13 aa, Homo sapiens
HPLNWEGTFYFDY

SEQ ID NO: 10433 - protein, 13 aa, Homo sapiens
HPLNWEGTHYFDY

SEQ ID NO: 10434 - protein, 10 aa, Homo sapiens
HPLWLTGTDY

SEQ ID NO: 10435 - protein, 14 aa, Homo sapiens
HPPPDILTGYYLDY

SEQ ID NO: 10436 - protein, 15 aa, Homo sapiens
HPRLRDFDWFRAFDV

SEQ ID NO: 10437 - protein, 13 aa, Homo sapiens
HPTYHYDRSGFDY

SEQ ID NO: 10438 - protein, 9 aa, Homo sapiens
HQFGASQKT

SEQ ID NO: 10439 - protein, 10 aa, Homo sapiens
HQFGGSLPLT

SEQ ID NO: 10440 - protein, 12 aa, Homo sapiens
HQGNPGLERFDP

SEQ ID NO: 10441 - protein, 16 aa, Homo sapiens
HQGYSVAGQGREWFDP

SEQ ID NO: 10442 - protein, 16 aa, Homo sapiens
HQGYSVAGQGREYFDP

SEQ ID NO: 10443 - protein, 10 aa, Homo sapiens
HQRGNWPGVT

SEQ ID NO: 10444 - protein, 10 aa, Homo sapiens
HQRSDWLMYT

SEQ ID NO: 10445 - protein, 10 aa, Homo sapiens
HQRSNWPFLT

SEQ ID NO: 10446 - protein, 15 aa, Homo sapiens
HQSEYSGYGRGVDGY

SEQ ID NO: 10447 - protein, 9 aa, Homo sapiens
HQSNKLPPT

SEQ ID NO: 10448 - protein, 9 aa, Homo sapiens
HQSSSFPLT

SEQ ID NO: 10449 - protein, 9 aa, Homo sapiens
HQSSSLPWT

SEQ ID NO: 10450 - protein, 9 aa, Homo sapiens
HQSYDNPQT

SEQ ID NO: 10451 - protein, 9 aa, Homo sapiens
HQSYDRPQT

SEQ ID NO: 10452 - protein, 9 aa, Homo sapiens
HQSYNNPRS

SEQ ID NO: 10453 - protein, 9 aa, Homo sapiens
HQSYNTPQT

SEQ ID NO: 10454 - protein, 9 aa, Homo sapiens
HQSYSNPRS

SEQ ID NO: 10455 - protein, 9 aa, Homo sapiens
HQSYSTPQV

SEQ ID NO: 10456 - protein, 10 aa, Homo sapiens
HQSYTTAPET

SEQ ID NO: 10457 - protein, 9 aa, Homo sapiens
HQYANWLYS

SEQ ID NO: 10458 - protein, 8 aa, Homo sapiens
HQYDDPWT

SEQ ID NO: 10459 - protein, 10 aa, Homo sapiens
HQYDNWPPLT

SEQ ID NO: 10460 - protein, 9 aa, Homo sapiens
HQYFETPFT

SEQ ID NO: 10461 - protein, 9 aa, Homo sapiens
HQYGGSPNT

SEQ ID NO: 10462 - protein, 9 aa, Homo sapiens
HQYGRSPWT

SEQ ID NO: 10463 - protein, 11 aa, Homo sapiens
HQYGSSPGSFT

SEQ ID NO: 10464 - protein, 9 aa, Homo sapiens
HQYGSSPST

SEQ ID NO: 10465 - protein, 9 aa, Homo sapiens
HQYGTSPLT

SEQ ID NO: 10466 - protein, 8 aa, Homo sapiens
HQYHSTPT

SEQ ID NO: 10467 - protein, 9 aa, Homo sapiens
HQYKTYPRT

SEQ ID NO: 10468 - protein, 9 aa, Homo sapiens
HQYNNWPRT

SEQ ID NO: 10469 - protein, 8 aa, Homo sapiens
HQYSRKYT

SEQ ID NO: 10470 - protein, 9 aa, Homo sapiens
HQYSTSPQT

SEQ ID NO: 10471 - protein, 9 aa, Homo sapiens
HQYYDAPHT

SEQ ID NO: 10472 - protein, 9 aa, Homo sapiens
HQYYGAPLT

SEQ ID NO: 10473 - protein, 9 aa, Homo sapiens
HQYYNWPRT

SEQ ID NO: 10474 - protein, 9 aa, Homo sapiens
HQYYNYPWT

SEQ ID NO: 10475 - protein, 9 aa, Homo sapiens
HQYYSFPHT

SEQ ID NO: 10476 - protein, 9 aa, Homo sapiens
HQYYSNPQT

SEQ ID NO: 10477 - protein, 9 aa, Homo sapiens
HQYYSPPWT

SEQ ID NO: 10478 - protein, 9 aa, Homo sapiens
HQYYSSPLS

SEQ ID NO: 10479 - protein, 9 aa, Homo sapiens
HQYYSSPWT

SEQ ID NO: 10480 - protein, 9 aa, Homo sapiens
HQYYSVPYT

SEQ ID NO: 10481 - protein, 18 aa, Homo sapiens
HRDVLRYFDWQPPFYFES

SEQ ID NO: 10482 - protein, 18 aa, Homo sapiens
HRGSITMVRGVDLGYFDY

SEQ ID NO: 10483 - protein, 15 aa, Homo sapiens
HRGYHTSGSQANFDS

SEQ ID NO: 10484 - protein, 13 aa, Homo sapiens
HRGYYSLYTWFDP

SEQ ID NO: 10485 - protein, 15 aa, Homo sapiens
HRRSREDPGYDHEDS

SEQ ID NO: 10486 - protein, 16 aa, Homo sapiens
HRSVFVTGKYGDYFDY

SEQ ID NO: 10487 - protein, 16 aa, Homo sapiens
HRSVIVTGRYGDYFDY

SEQ ID NO: 10488 - protein, 16 aa, Homo sapiens
HRSVVVKGRYGDYFDF

SEQ ID NO: 10489 - protein, 12 aa, Homo sapiens
HRTYYESGPLDS

SEQ ID NO: 10490 - protein, 14 aa, Homo sapiens
HSGYHYGNSGHFDY

SEQ ID NO: 10491 - protein, 14 aa, Homo sapiens
HSGYHYGNSGHFEY

SEQ ID NO: 10492 - protein, 13 aa, Homo sapiens
HSGYTFTRYSMDV

SEQ ID NO: 10493 - protein, 16 aa, Homo sapiens
HSVSNGEKSYTTSLNS

SEQ ID NO: 10494 - protein, 5 aa, Homo sapiens
HSYLS

SEQ ID NO: 10495 - protein, 15 aa, Homo sapiens
HSYWDKSTHYRHFDY

SEQ ID NO: 10496 - protein, 15 aa, Homo sapiens
HSYYDKSTHYRHFDY

SEQ ID NO: 10497 - protein, 12 aa, Homo sapiens
HSYYYDSSALDY

SEQ ID NO: 10498 - protein, 14 aa, Homo sapiens
HTAKFPPDPDAFDV

SEQ ID NO: 10499 - protein, 16 aa, Homo sapiens
HTFSRSRRHFYYYMDV

SEQ ID NO: 10500 - protein, 12 aa, Homo sapiens
HTGYSAGGHFDY

SEQ ID NO: 10501 - protein, 12 aa, Homo sapiens
HTGYSSDGHFDY

SEQ ID NO: 10502 - protein, 10 aa, Homo sapiens
HVAGNQAFDL

SEQ ID NO: 10503 - protein, 16 aa, Homo sapiens
HVFISGSTNYNPSLKS

SEQ ID NO: 10504 - protein, 14 aa, Homo sapiens
HVFVGATLRGPMDI

SEQ ID NO: 10505 - protein, 12 aa, Homo sapiens
HVGYNFGSPFDS

SEQ ID NO: 10506 - protein, 9 aa, Homo sapiens
HVWDSGTVV

SEQ ID NO: 10507 - protein, 9 aa, Homo sapiens
HVWDSSTAV

SEQ ID NO: 10508 - protein, 11 aa, Homo sapiens
HVWFGEFLFDY

SEQ ID NO: 10509 - protein, 13 aa, Homo sapiens
HWALYSSSSVLQH

SEQ ID NO: 10510 - protein, 5 aa, Homo sapiens
HYAIT

SEQ ID NO: 10511 - protein, 5 aa, Homo sapiens
HYAMT

SEQ ID NO: 10512 - protein, 15 aa, Homo sapiens
HYFYDKSTHYRHFDS

SEQ ID NO: 10513 - protein, 5 aa, Homo sapiens
HYGIS

SEQ ID NO: 10514 - protein, 5 aa, Homo sapiens
HYGMN

SEQ ID NO: 10515 - protein, 5 aa, Homo sapiens
HYVIH

SEQ ID NO: 10516 - protein, 5 aa, Homo sapiens
HYWMT

SEQ ID NO: 10517 - protein, 15 aa, Homo sapiens
HYYGSGSYFLDGFDI

SEQ ID NO: 10518 - protein, 5 aa, Homo sapiens
HYYMS

SEQ ID NO: 10519 - protein, 11 aa, Homo sapiens
IAAAGLNWFDP

SEQ ID NO: 10520 - protein, 7 aa, Homo sapiens
IAGIQGI

SEQ ID NO: 10521 - protein, 7 aa, Homo sapiens
IASRLQS

SEQ ID NO: 10522 - protein, 14 aa, Homo sapiens
ICGGRCDYYKGLDV

SEQ ID NO: 10523 - protein, 13 aa, Homo sapiens
IDVIPSTMGGFDY

SEQ ID NO: 10524 - protein, 95 aa, Homo sapiens
IEMTQSPSSLSAYVGDSVSFSCRASQDIDTYLNWYQLKIGGAPKLLIYGASTLESGVSSRFRGSGSGTDFTLTITNVEPDDLAIYYCQQSFNTPP

SEQ ID NO: 10525 - protein, 106 aa, Homo sapiens
IEMTQSPSSLSAYVGDSVSFSCRASQDIDTYLNWYQLKIGGAPKLLIYGASTLESGVSSRFRGSGSGTDFTLTITNVEPDDLAIYYCQQSFNTPPYTFGQGTKLEI

SEQ ID NO: 10526 - protein, 10 aa, Homo sapiens
IEWEQWLVRY

SEQ ID NO: 10527 - protein, 15 aa, Homo sapiens
IFHFENGGYYRHFDC

SEQ ID NO: 10528 - protein, 15 aa, Homo sapiens
IFHFEQGGFYRHFDS

SEQ ID NO: 10529 - protein, 17 aa, Homo sapiens
IGGGSRSYEDYYYGLDV

SEQ ID NO: 10530 - protein, 14 aa, Homo sapiens
IGGSDDYSHLWFDP

SEQ ID NO: 10531 - protein, 7 aa, Homo sapiens
IGGYSGS

SEQ ID NO: 10532 - protein, 13 aa, Homo sapiens
IGNSNNIGKYAVG

SEQ ID NO: 10533 - protein, 13 aa, Homo sapiens
IGSNSNLQNAYVS

SEQ ID NO: 10534 - protein, 5 aa, Homo sapiens
IHSMY

SEQ ID NO: 10535 - protein, 17 aa, Homo sapiens
IIFPGDSDTRYSPSSQG

SEQ ID NO: 10536 - protein, 17 aa, Homo sapiens
IIHLGDSETRYSPSFQG

SEQ ID NO: 10537 - protein, 17 aa, Homo sapiens
IIIPSAGATTYAQKFQG

SEQ ID NO: 10538 - protein, 17 aa, Homo sapiens
IIMPERSETTYNPSFQV

SEQ ID NO: 10539 - protein, 17 aa, Homo sapiens
IINASGERTNNAQRFQG

SEQ ID NO: 10540 - protein, 16 aa, Homo sapiens
IINIDGTKKYADSVKG

SEQ ID NO: 10541 - protein, 17 aa, Homo sapiens
IINPGGDWTRYAQKFQG

SEQ ID NO: 10542 - protein, 17 aa, Homo sapiens
IINPNTGYTTYAQRFQG

SEQ ID NO: 10543 - protein, 17 aa, Homo sapiens
IINPSAGSTSYAQRFQG

SEQ ID NO: 10544 - protein, 17 aa, Homo sapiens
IINPSGGSTSYAQKFQG

SEQ ID NO: 10545 - protein, 17 aa, Homo sapiens
IINPSGGSTTYAQKFQG

SEQ ID NO: 10546 - protein, 17 aa, Homo sapiens
IINPSSGSTNYAQKFQG

SEQ ID NO: 10547 - protein, 17 aa, Homo sapiens
IINPSSGSTSYAQKFQG

SEQ ID NO: 10548 - protein, 17 aa, Homo sapiens
IISDNGGKTYYADSVKG

SEQ ID NO: 10549 - protein, 17 aa, Homo sapiens
IISFDGKYENYADSVKG

SEQ ID NO: 10550 - protein, 17 aa, Homo sapiens
IISFDGSNKFYADSVKG

SEQ ID NO: 10551 - protein, 17 aa, Homo sapiens
IISGSGVSTYYADSVKG

SEQ ID NO: 10552 - protein, 17 aa, Homo sapiens
IISNDGNRKYYADSVKG

SEQ ID NO: 10553 - protein, 17 aa, Homo sapiens
IISPSGDSANYAQKFQG

SEQ ID NO: 10554 - protein, 10 aa, Homo sapiens
IISRSSGLDV

SEQ ID NO: 10555 - protein, 17 aa, Homo sapiens
IISYDGNNQYYADSVRG

SEQ ID NO: 10556 - protein, 17 aa, Homo sapiens
IISYDGSKKYHADSVRG

SEQ ID NO: 10557 - protein, 17 aa, Homo sapiens
IISYDGSNKFYADSVKG

SEQ ID NO: 10558 - protein, 17 aa, Homo sapiens
IISYDGTNKFYADSVKG

SEQ ID NO: 10559 - protein, 17 aa, Homo sapiens
IISYEGSNKYYGDSVKG

SEQ ID NO: 10560 - protein, 17 aa, Homo sapiens
IIWNDGSKKYYGDSVRG

SEQ ID NO: 10561 - protein, 17 aa, Homo sapiens
IIWYDGSHKDYADSVQG

SEQ ID NO: 10562 - protein, 17 aa, Homo sapiens
IIWYDGSHKDYGDSVKG

SEQ ID NO: 10563 - protein, 16 aa, Homo sapiens
IIYGGGATHYADSVKG

SEQ ID NO: 10564 - protein, 16 aa, Homo sapiens
IIYHGGITYYNPSLKS

SEQ ID NO: 10565 - protein, 17 aa, Homo sapiens
IIYPDDSDIRYSPSFQG

SEQ ID NO: 10566 - protein, 17 aa, Homo sapiens
IIYPDDSDTRYSPSFQG

SEQ ID NO: 10567 - protein, 17 aa, Homo sapiens
IIYPGDSDTKYSPSFEG

SEQ ID NO: 10568 - protein, 17 aa, Homo sapiens
IIYPGDSDTKYSPSFQG

SEQ ID NO: 10569 - protein, 17 aa, Homo sapiens
IIYPGDSDTRYNPSFQG

SEQ ID NO: 10570 - protein, 17 aa, Homo sapiens
IIYPGDSDTRYRPSFQG

SEQ ID NO: 10571 - protein, 17 aa, Homo sapiens
IIYPGDSDTRYSPSFQG

SEQ ID NO: 10572 - protein, 17 aa, Homo sapiens
IIYPGDSDTRYSQSFQG

SEQ ID NO: 10573 - protein, 17 aa, Homo sapiens
IIYPGDSSVRYSPPFQG

SEQ ID NO: 10574 - protein, 17 aa, Homo sapiens
IIYPRDSETTYSPSFQG

SEQ ID NO: 10575 - protein, 16 aa, Homo sapiens
IIYRDTTIYNADSVKG

SEQ ID NO: 10576 - protein, 16 aa, Homo sapiens
IIYSGGNAYYADSVKG

SEQ ID NO: 10577 - protein, 16 aa, Homo sapiens
IIYSGGNTYYADSVKG

SEQ ID NO: 10578 - protein, 16 aa, Homo sapiens
IIYSGGSTDYADSVKG

SEQ ID NO: 10579 - protein, 16 aa, Homo sapiens
IIYWDDDKRYRASLEN

SEQ ID NO: 10580 - protein, 16 aa, Homo sapiens
IIYWDDDKRYSPSLKN

SEQ ID NO: 10581 - protein, 16 aa, Homo sapiens
IIYWDDDKRYSPSLKT

SEQ ID NO: 10582 - protein, 16 aa, Homo sapiens
IIYWDDDKRYTPSLEN

SEQ ID NO: 10583 - protein, 17 aa, Homo sapiens
IKSYYGSGSYFITPFDY

SEQ ID NO: 10584 - protein, 16 aa, Homo sapiens
ILGSGNYPPTQGYFDS

SEQ ID NO: 10585 - protein, 19 aa, Homo sapiens
ILPENYVDSSGYRGWYFDP

SEQ ID NO: 10586 - protein, 16 aa, Homo sapiens
ILYRGGKTYYADSVKG

SEQ ID NO: 10587 - protein, 93 aa, Homo sapiens
IMLTQSPDTLSLSPGERATLSCRASQNIRNYLSWYQQKPGQAPRLLIYDTSNRATGIPARFSGGGWGTDFTLTISRLEPEDFAVYYCQQRYDW

SEQ ID NO: 10588 - protein, 105 aa, Homo sapiens
IMLTQSPDTLSLSPGERATLSCRASQNIRNYLSWYQQKPGQAPRLLIYDTSNRATGIPARFSGGGWGTDFTLTISRLEPEDFAVYYCQQRYDWRIIFGQGTRLEI

SEQ ID NO: 10589 - protein, 11 aa, Homo sapiens
INSDGSHTKDD

SEQ ID NO: 10590 - protein, 11 aa, Homo sapiens
INSDGSHTKGD

SEQ ID NO: 10591 - protein, 13 aa, Homo sapiens
INSSWPSLGPLDI

SEQ ID NO: 10592 - protein, 18 aa, Homo sapiens
IPPRITMVRGASQDGMDV

SEQ ID NO: 10593 - protein, 14 aa, Homo sapiens
IPTDYDILTGYYSY

SEQ ID NO: 10594 - protein, 14 aa, Homo sapiens
IQDDDASRYRPFDV

SEQ ID NO: 10595 - protein, 94 aa, Homo sapiens
IQLTQSPSFLSASVGDRVTITCRASQGITNSLAWYQQKSGKAPKLLIYAASILQSEVPLRFNGSGSGTEFTLTVSSLQPEDFATYFCQQLNSSP

SEQ ID NO: 10596 - protein, 105 aa, Homo sapiens
IQLTQSPSFLSASVGDRVTITCRASQGITNSLAWYQQKSGKAPKLLIYAASILQSEVPLRFNGSGSGTEFTLTVSSLQPEDFATYFCQQLNSSPYTFGQGTKLEI

SEQ ID NO: 10597 - protein, 93 aa, Homo sapiens
IQLTQSPSSLSASVGDRVTISCRASQGISSYLAWYQQKPGKAPKLLIYSASTLQSGVPPRFSGSGSGTNFTLTISSLQPEDFATYYCQQLDSY

SEQ ID NO: 10598 - protein, 106 aa, Homo sapiens
IQLTQSPSSLSASVGDRVTISCRASQGISSYLAWYQQKPGKAPKLLIYSASTLQSGVPPRFSGSGSGTNFTLTISSLQPEDFATYYCQQLDSYTYTFGQGTKLDIK

SEQ ID NO: 10599 - protein, 94 aa, Homo sapiens
IQLTQSPSSLSASVGDRVTVTCRASQGINNYLAWYQQKPGKAPDLLIYAASNLVSGVPSRFSGSGSGTDFTLTISSLQPEDIATYYCQQLDTNP

SEQ ID NO: 10600 - protein, 105 aa, Homo sapiens
IQLTQSPSSLSASVGDRVTVTCRASQGINNYLAWYQQKPGKAPDLLIYAASNLVSGVPSRFSGSGSGTDFTLTISSLQPEDIATYYCQQLDTNPLTFGGGTKVEI

SEQ ID NO: 10601 - protein, 94 aa, Homo sapiens
IQMNQSPSTLCASVGDRVTITCRASQSINGWLAWYQQKPGKAPKLLIHWTSTLENGVTSRFSGSGSGTEFTLTISSLQPDDCATYYCQQYNSYS

SEQ ID NO: 10602 - protein, 107 aa, Homo sapiens
IQMNQSPSTLCASVGDRVTITCRASQSINGWLAWYQQKPGKAPKLLIHWTSTLENGVTSRFSGSGSGTEFTLTISSLQPDDCATYYCQQYNSYSSYTFGQGTKVEIK

SEQ ID NO: 10603 - protein, 94 aa, Homo sapiens
IQMTQSPSSLSASVGDRVTITCRASQGISNYLTWYQQKPGKAPKLLIYAASTLHSGVPSRFSGSGSGTDFTLTISSLQPEDFATYYCQHLDTYP

SEQ ID NO: 10604 - protein, 106 aa, Homo sapiens
IQMTQSPSSLSASVGDRVTITCRASQGISNYLTWYQQKPGKAPKLLIYAASTLHSGVPSRFSGSGSGTDFTLTISSLQPEDFATYYCQHLDTYPLTFGGGTKVEIK

SEQ ID NO: 10605 - protein, 94 aa, Homo sapiens
IQMTQSPSSVSASVGDRVSITCRASQDISDYLAWYQQKPGKAPKLLIYAASSLQSGVPSRFSGSGSGTDFTLTITSLQPEDFATYYCQQANRFP

SEQ ID NO: 10606 - protein, 106 aa, Homo sapiens
IQMTQSPSSVSASVGDRVSITCRASQDISDYLAWYQQKPGKAPKLLIYAASSLQSGVPSRFSGSGSGTDFTLTITSLQPEDFATYYCQQANRFPLSFGGGTKVDVK

SEQ ID NO: 10607 - protein, 94 aa, Homo sapiens
IQMTQSPSTLSASVGDRVTITCRASQSINSWLAWYQQKPGKAPKLLIHQASSLESGVPSRFSGSGSGTEFTLTISSLQPDDFATYYCQQYNSYA

SEQ ID NO: 10608 - protein, 107 aa, Homo sapiens
IQMTQSPSTLSASVGDRVTITCRASQSINSWLAWYQQKPGKAPKLLIHQASSLESGVPSRFSGSGSGTEFTLTISSLQPDDFATYYCQQYNSYASYTFGQGTKLEMK

SEQ ID NO: 10609 - protein, 22 aa, Homo sapiens
IRDRLRDGDDDDYLGPYDAFDI

SEQ ID NO: 10610 - protein, 92 aa, Homo sapiens
IRMTQSPFSLSASVGDRVTITCRASQSVSNWLAWYQQKPGKAPKLLIYKASILESGVPSRYSGSGSATEFTLTISSLQPEDAATYYCQKYNS

SEQ ID NO: 10611 - protein, 106 aa, Homo sapiens
IRMTQSPFSLSASVGDRVTITCRASQSVSNWLAWYQQKPGKAPKLLIYKASILESGVPSRYSGSGSATEFTLTISSLQPEDAATYYCQKYNSAPLTFGGGTKVEIK

SEQ ID NO: 10612 - protein, 10 aa, Homo sapiens
ISYAGSNNLV

SEQ ID NO: 10613 - protein, 11 aa, Homo sapiens
ITVGYFPYFDF

SEQ ID NO: 10614 - protein, 17 aa, Homo sapiens
IVFPGDSDTKYSPSFQG

SEQ ID NO: 10615 - protein, 94 aa, Homo sapiens
IVLTQSPATLSLSPGERATLSCRASQRISSFLAWYQQKPGQAPRLLIYDASNRATGIPARFSGSGSGTDFTLTISSLEPEDFAVYYCQQRANWP

SEQ ID NO: 10616 - protein, 107 aa, Homo sapiens
IVLTQSPATLSLSPGERATLSCRASQRISSFLAWYQQKPGQAPRLLIYDASNRATGIPARFSGSGSGTDFTLTISSLEPEDFAVYYCQQRANWPLLSFGGGTKVEIK

SEQ ID NO: 10617 - protein, 95 aa, Homo sapiens
IVLTQSPATLSLSPGERATLSCRASQSVTSYLAWYQHKPGQAPRLLIYDASKRATGIPARFSGSGSGTDFTLTISSLEPEDFAVYYCQQRSNWPP

SEQ ID NO: 10618 - protein, 107 aa, Homo sapiens
IVLTQSPATLSLSPGERATLSCRASQSVTSYLAWYQHKPGQAPRLLIYDASKRATGIPARFSGSGSGTDFTLTISSLEPEDFAVYYCQQRSNWPPLTFGGGTKVEIK

SEQ ID NO: 10619 - protein, 95 aa, Homo sapiens
IVLTQSPGTLSLSPGERATLSCRASDSIRNNFLAWYQQKPGQAPRLLIYGASRRATGIPDRFSGSGTGTDFTLTINTLEPEDFAVYYCQQYGGSP

SEQ ID NO: 10620 - protein, 108 aa, Homo sapiens
IVLTQSPGTLSLSPGERATLSCRASDSIRNNFLAWYQQKPGQAPRLLIYGASRRATGIPDRFSGSGTGTDFTLTINTLEPEDFAVYYCQQYGGSPRITFGQGTRLEIK

SEQ ID NO: 10621 - protein, 95 aa, Homo sapiens
IVLTQSPGTLSLSPGERATLSCRASQSISSNSLAWYQQKPAQAPRLLIYGASSRATGIPDRFSGSGSGTDFTLTISRLEPEDFAVYYCQQYGGSP

SEQ ID NO: 10622 - protein, 107 aa, Homo sapiens
IVLTQSPGTLSLSPGERATLSCRASQSISSNSLAWYQQKPAQAPRLLIYGASSRATGIPDRFSGSGSGTDFTLTISRLEPEDFAVYYCQQYGGSPYSFGQGTKLEIK

SEQ ID NO: 10623 - protein, 95 aa, Homo sapiens
IVLTQSPGTLSLSPGERATLSCRASQSVSSNYLAWYQQKPGLAPRLLIYDTSNRATGIPDRFSGSGSGTDFTLTISRLEPEDFAVYYCQHYGPSP

SEQ ID NO: 10624 - protein, 107 aa, Homo sapiens
IVLTQSPGTLSLSPGERATLSCRASQSVSSNYLAWYQQKPGLAPRLLIYDTSNRATGIPDRFSGSGSGTDFTLTISRLEPEDFAVYYCQHYGPSPLTFGGGTKVEIK

SEQ ID NO: 10625 - protein, 96 aa, Homo sapiens
IVLTQSPGTLSLSPGERATLSCRASQSVSSSYLAWYQQKPGLAPRLLIYDSSNRATGIPDRFSGSGSGTDFTLTISRLEPEDFAVYYCQQYDNSPP

SEQ ID NO: 10626 - protein, 107 aa, Homo sapiens
IVLTQSPGTLSLSPGERATLSCRASQSVSSSYLAWYQQKPGLAPRLLIYDSSNRATGIPDRFSGSGSGTDFTLTISRLEPEDFAVYYCQQYDNSPPTFGQGTKVEIK

SEQ ID NO: 10627 - protein, 94 aa, Homo sapiens
IVLTQSPGTLSLSPGERATLSCRASQSVSSSYLAWYQQKPGQAPRLLIYGASSRATGIPDRFSGSGSGTDFTLTISRLEPEDFAVYYCQQYGNS

SEQ ID NO: 10628 - protein, 108 aa, Homo sapiens
IVLTQSPGTLSLSPGERATLSCRASQSVSSSYLAWYQQKPGQAPRLLIYGASSRATGIPDRFSGSGSGTDFTLTISRLEPEDFAVYYCQQYGNSLTWTFGQGTKVEIK

SEQ ID NO: 10629 - protein, 94 aa, Homo sapiens
IVMAQSPATLSVSPGERATLSCRASASVGSHLAWYQQKPGQAPRLLFYGASTRAIGVPARFSGGGSGTEFTLTISSLQSEDSAVYYCQQYNNWP

SEQ ID NO: 10630 - protein, 105 aa, Homo sapiens
IVMAQSPATLSVSPGERATLSCRASASVGSHLAWYQQKPGQAPRLLFYGASTRAIGVPARFSGGGSGTEFTLTISSLQSEDSAVYYCQQYNNWPLFGQGTRLEIK

SEQ ID NO: 10631 - protein, 94 aa, Homo sapiens
IVMTQFPATLSVSPGERVTLSCRASASISSHLAWYQQKPGQAPRLLIYGASTRATGIPARFSGSGSGTEFTLTISSLQSEDLAVYYCQQYNNWP

SEQ ID NO: 10632 - protein, 105 aa, Homo sapiens
IVMTQFPATLSVSPGERVTLSCRASASISSHLAWYQQKPGQAPRLLIYGASTRATGIPARFSGSGSGTEFTLTISSLQSEDLAVYYCQQYNNWPLFGQGTKLQIK

SEQ ID NO: 10633 - protein, 94 aa, Homo sapiens
IVMTQFPATLSVSPGERVTLSCRASASISSHLAWYQQKPGQAPRLLIYGASTRATGIPARFSGSGSGTEFTLTISSLQSEDLGVYYCQQYNNWP

SEQ ID NO: 10634 - protein, 105 aa, Homo sapiens
IVMTQFPATLSVSPGERVTLSCRASASISSHLAWYQQKPGQAPRLLIYGASTRATGIPARFSGSGSGTEFTLTISSLQSEDLGVYYCQQYNNWPLFGQGTKLQIK

SEQ ID NO: 10635 - protein, 95 aa, Homo sapiens
IVMTQSPAMLSVSPGERATLSCRASQNIRSSLAWYQQKPGQAPRLLIYGASTRATGIPARFSGGGSGTDFTLTISSLQSEDVAVYYCQQYNNWPP

SEQ ID NO: 10636 - protein, 107 aa, Homo sapiens
IVMTQSPAMLSVSPGERATLSCRASQNIRSSLAWYQQKPGQAPRLLIYGASTRATGIPARFSGGGSGTDFTLTISSLQSEDVAVYYCQQYNNWPPITFGPGTKLDIQ

SEQ ID NO: 10637 - protein, 95 aa, Homo sapiens
IVMTQSPATLSVSPGEGATLSCRASQSISNNLAWYQQKPGQAPRLLMYDASTRATGIPARFSGSGSGTEFTLTISSLQSEDFAVYYCQQYNNWPP

SEQ ID NO: 10638 - protein, 107 aa, Homo sapiens
IVMTQSPATLSVSPGEGATLSCRASQSISNNLAWYQQKPGQAPRLLMYDASTRATGIPARFSGSGSGTEFTLTISSLQSEDFAVYYCQQYNNWPPITFGQGTRLEIK

SEQ ID NO: 10639 - protein, 94 aa, Homo sapiens
IVMTQSPATLSVSPGERATLSCRASATISNNLAWYQQRPGHAPRLLLYGASTRATGIPARFTGSGSGTEFTLAISSLQSEDSAIYYCQQYNNWP

SEQ ID NO: 10640 - protein, 105 aa, Homo sapiens
IVMTQSPATLSVSPGERATLSCRASATISNNLAWYQQRPGHAPRLLLYGASTRATGIPARFTGSGSGTEFTLAISSLQSEDSAIYYCQQYNNWPTFGGGTKVEIK

SEQ ID NO: 10641 - protein, 95 aa, Homo sapiens
IVMTQSPATLSVSPGERATLSCRASQSISSNLAWYQQQPGQAPRLLIYGASTRASDIPARFSGSGSGTEFTLTISSLQSEDFAVYYCQQYHNWPP

SEQ ID NO: 10642 - protein, 107 aa, Homo sapiens
IVMTQSPATLSVSPGERATLSCRASQSISSNLAWYQQQPGQAPRLLIYGASTRASDIPARFSGSGSGTEFTLTISSLQSEDFAVYYCQQYHNWPPITFGQGTKVEIK

SEQ ID NO: 10643 - protein, 95 aa, Homo sapiens
IVMTQSPATLSVSPGERATLSCRASQSVSRKLAWYQQRPGQSPRLLIYGASTRATGVPARFSGSGSGTDFTLTISSMQSEDFAVYYCHQYDNWPP

SEQ ID NO: 10644 - protein, 107 aa, Homo sapiens
IVMTQSPATLSVSPGERATLSCRASQSVSRKLAWYQQRPGQSPRLLIYGASTRATGVPARFSGSGSGTDFTLTISSMQSEDFAVYYCHQYDNWPPLTFGGGTKVEIK

SEQ ID NO: 10645 - protein, 95 aa, Homo sapiens
IVMTQSPATLSVSPGETATLSCRASQSVSSDLAWYQQKPGQAPRLLIYGASIRAAAIPARFSGSGSGTEFTLTISRLQSEDFAVYYCQQYNNWPP

SEQ ID NO: 10646 - protein, 107 aa, Homo sapiens
IVMTQSPATLSVSPGETATLSCRASQSVSSDLAWYQQKPGQAPRLLIYGASIRAAAIPARFSGSGSGTEFTLTISRLQSEDFAVYYCQQYNNWPPITFGGGTTVEIK

SEQ ID NO: 10647 - protein, 94 aa, Homo sapiens
IVMTQSPATLSVSPGGSAILSCRASHSISSHLAWYQHKPGLAPRLLIYDASTRAAGIPARFSGSGSGTEFTLTISSLQSEDCGVYYCQQYNNWP

SEQ ID NO: 10648 - protein, 104 aa, Homo sapiens
IVMTQSPATLSVSPGGSAILSCRASHSISSHLAWYQHKPGLAPRLLIYDASTRAAGIPARFSGSGSGTEFTLTISSLQSEDCGVYYCQQYNNWPCFGQGTKLEI

SEQ ID NO: 10649 - protein, 98 aa, Homo sapiens
IVMTQSPDSLAVSLGERATINCKSSQSLLYRSNNKNYLAWYQKKPGQPPKLLIYWASTRESGVPDRFSGSGSGTDFTLTISSLQAEDVAVYYCQQYYI

SEQ ID NO: 10650 - protein, 111 aa, Homo sapiens
IVMTQSPDSLAVSLGERATINCKSSQSLLYRSNNKNYLAWYQKKPGQPPKLLIYWASTRESGVPDRFSGSGSGTDFTLTISSLQAEDVAVYYCQQYYISNLSFGGGTEVEI

SEQ ID NO: 10651 - protein, 100 aa, Homo sapiens
IVMTQSPDSLAVSLGERATINCRSSQSVLWNDNKKNYLAWYQQKPGQSPKLLIYWASVRESGVPDRFSGSGSGTEFALTISSLQAEDVGVYYCHQYYGAP

SEQ ID NO: 10652 - protein, 112 aa, Homo sapiens
IVMTQSPDSLAVSLGERATINCRSSQSVLWNDNKKNYLAWYQQKPGQSPKLLIYWASVRESGVPDRFSGSGSGTEFALTISSLQAEDVGVYYCHQYYGAPLTYGGGTKVEIK

SEQ ID NO: 10653 - protein, 98 aa, Homo sapiens
IVMTQSPLSLPVTPGEPASISCRSSQSLLHSNGYNYLDWYLHRPGQSPHLLIYLGSIRASGVPDRFSGSGSGTDFTLRISRVEPEDVGVYYCMQSLQT

SEQ ID NO: 10654 - protein, 111 aa, Homo sapiens
IVMTQSPLSLPVTPGEPASISCRSSQSLLHSNGYNYLDWYLHRPGQSPHLLIYLGSIRASGVPDRFSGSGSGTDFTLRISRVEPEDVGVYYCMQSLQTQLTFGGGTKVEIK

SEQ ID NO: 10655 - protein, 99 aa, Homo sapiens
IVMTQSPLSLPVTPGEPASISCRSSQSLLHSNGYNYLDWYLQKPGQSPQLLIYWGSNRASGVPDRFSGSGSGTDFTLKISRVEADDVGVYYCMQALETP

SEQ ID NO: 10656 - protein, 111 aa, Homo sapiens
IVMTQSPLSLPVTPGEPASISCRSSQSLLHSNGYNYLDWYLQKPGQSPQLLIYWGSNRASGVPDRFSGSGSGTDFTLKISRVEADDVGVYYCMQALETPITFGQGTRLEIK

SEQ ID NO: 10657 - protein, 99 aa, Homo sapiens
IVMTQSPLSLPVTPGESASISCRSSQSLLHRNGFNYLDWYVQKPGQSPQLLIYLGSNRASGVPDRFSGSGSGTDFTLKISEVEAGDVGFYYCMQALQTP

SEQ ID NO: 10658 - protein, 111 aa, Homo sapiens
IVMTQSPLSLPVTPGESASISCRSSQSLLHRNGFNYLDWYVQKPGQSPQLLIYLGSNRASGVPDRFSGSGSGTDFTLKISEVEAGDVGFYYCMQALQTPWTFGQGTKVEIK

SEQ ID NO: 10659 - protein, 100 aa, Homo sapiens
IVMTQSPLSLSVTPGQPASISCKSSQSLLHSDGKTYLFWYLQKPGQSPQLLIHEVSNRFSGVTDRFSGSGSGSDFTLKISRVEAEDVGVYFCMQSVQVPP

SEQ ID NO: 10660 - protein, 111 aa, Homo sapiens
IVMTQSPLSLSVTPGQPASISCKSSQSLLHSDGKTYLFWYLQKPGQSPQLLIHEVSNRFSGVTDRFSGSGSGSDFTLKISRVEAEDVGVYFCMQSVQVPPTFGQGTKVDIK

SEQ ID NO: 10661 - protein, 97 aa, Homo sapiens
IVMTQSPLSVSVSPGQPTSISCKSSQSLLHQDGKTYLYWYLQKPGQSPHLLIYEVSSRFSGVPDRFSGSGSGTDFTLKISRVEAEDVGVYFCMQGKH

SEQ ID NO: 10662 - protein, 112 aa, Homo sapiens
IVMTQSPLSVSVSPGQPTSISCKSSQSLLHQDGKTYLYWYLQKPGQSPHLLIYEVSSRFSGVPDRFSGSGSGTDFTLKISRVEAEDVGVYFCMQGKHWSEFTFGPGTKVEIK

SEQ ID NO: 10663 - protein, 98 aa, Homo sapiens
IVMTQTPLSLPVTPGQPASISCKSSQSLLHTDGKTYMSWYLQKPGQSPQLLIYEVSSRFSGVPDRFSGSGSGTEFTLKISRVGAEDVGIYYCMQGLHL

SEQ ID NO: 10664 - protein, 110 aa, Homo sapiens
IVMTQTPLSLPVTPGQPASISCKSSQSLLHTDGKTYMSWYLQKPGQSPQLLIYEVSSRFSGVPDRFSGSGSGTEFTLKISRVGAEDVGIYYCMQGLHLYSFGQGTKLEIK

SEQ ID NO: 10665 - protein, 97 aa, Homo sapiens
IVMTQTPLSLSVTPGQPASISCKSSQSLLHEDGKTYLYWYLQKPGQSPQPLIYEVFGRFSGVPDRFTGSGSGTDFTLQISRVEADDVGVYYCMQGKH

SEQ ID NO: 10666 - protein, 111 aa, Homo sapiens
IVMTQTPLSLSVTPGQPASISCKSSQSLLHEDGKTYLYWYLQKPGQSPQPLIYEVFGRFSGVPDRFTGSGSGTDFTLQISRVEADDVGVYYCMQGKHWKEFTFGPGTKVDI

SEQ ID NO: 10667 - protein, 100 aa, Homo sapiens
IVMTQTPLSLSVTPGQPASISCKSSQSLLHSDGKTYLYWYLQKPGQSPQLLMYEVSSRFSGVPDRFSGSGSGTDFTLKISRVEAEDVGVYYCMQGVHLPP

SEQ ID NO: 10668 - protein, 112 aa, Homo sapiens
IVMTQTPLSLSVTPGQPASISCKSSQSLLHSDGKTYLYWYLQKPGQSPQLLMYEVSSRFSGVPDRFSGSGSGTDFTLKISRVEAEDVGVYYCMQGVHLPPVTFGQGTRLEIK

SEQ ID NO: 10669 - protein, 17 aa, Homo sapiens
IVNPPGGSTIYAQKFQG

SEQ ID NO: 10670 - protein, 17 aa, Homo sapiens
IVNPPGGTTIYAQKFQG

SEQ ID NO: 10671 - protein, 7 aa, Homo sapiens
IVSNLQS

SEQ ID NO: 10672 - protein, 17 aa, Homo sapiens
IVTDFRGVVHHYDAFDV

SEQ ID NO: 10673 - protein, 100 aa, Homo sapiens
IVVTQSPASLAVSLGERATINCKSSQSVLYSSNEKNYLAWYQQKPGQPPKLLIYWASTRESGVPDRFSGSGSHTDFTLTISSLQAEDVAVYYCQQYYDSP

SEQ ID NO: 10674 - protein, 112 aa, Homo sapiens
IVVTQSPASLAVSLGERATINCKSSQSVLYSSNEKNYLAWYQQKPGQPPKLLIYWASTRESGVPDRFSGSGSHTDFTLTISSLQAEDVAVYYCQQYYDSPLAFGGGTKVEIK

SEQ ID NO: 10675 - protein, 15 aa, Homo sapiens
IVVVPAAESTDAFDV

SEQ ID NO: 10676 - protein, 15 aa, Homo sapiens
IVVVPAAQSKDAFDF

SEQ ID NO: 10677 - protein, 17 aa, Homo sapiens
IVYPGDSDSKYNPSFQG

SEQ ID NO: 10678 - protein, 21 aa, Homo sapiens
IVYPGDSKSDSKSTYNPSFQG

SEQ ID NO: 10679 - protein, 18 aa, Homo sapiens
IYAEKLYNWESEGAAFDV

SEQ ID NO: 10680 - protein, 5 aa, Homo sapiens
IYAMH

SEQ ID NO: 10681 - protein, 5 aa, Homo sapiens
IYAMS

SEQ ID NO: 10682 - protein, 5 aa, Homo sapiens
IYEMN

SEQ ID NO: 10683 - protein, 12 aa, Homo sapiens
IYGGDTGGYFDY

SEQ ID NO: 10684 - protein, 5 aa, Homo sapiens
IYGIT

SEQ ID NO: 10685 - protein, 5 aa, Homo sapiens
IYGLS

SEQ ID NO: 10686 - protein, 5 aa, Homo sapiens
IYGMN

SEQ ID NO: 10687 - protein, 15 aa, Homo sapiens
IYHFEDGGYYRHFDY

SEQ ID NO: 10688 - protein, 15 aa, Homo sapiens
IYHFEKGGHYRHFDY

SEQ ID NO: 10689 - protein, 5 aa, Homo sapiens
IYNMH

SEQ ID NO: 10690 - protein, 5 aa, Homo sapiens
IYSIN

SEQ ID NO: 10691 - protein, 5 aa, Homo sapiens
IYSLN

SEQ ID NO: 10692 - protein, 5 aa, Homo sapiens
IYSMH

SEQ ID NO: 10693 - protein, 18 aa, Homo sapiens
IYVEKLYNWESEGAAFDF

SEQ ID NO: 10694 - protein, 5 aa, Homo sapiens
IYVMH

SEQ ID NO: 10695 - protein, 7 aa, Homo sapiens
KAANLES

SEQ ID NO: 10696 - protein, 7 aa, Homo sapiens
KASHLES

SEQ ID NO: 10697 - protein, 7 aa, Homo sapiens
KASILES

SEQ ID NO: 10698 - protein, 7 aa, Homo sapiens
KASILNS

SEQ ID NO: 10699 - protein, 7 aa, Homo sapiens
KASKLER

SEQ ID NO: 10700 - protein, 7 aa, Homo sapiens
KASKLES

SEQ ID NO: 10701 - protein, 11 aa, Homo sapiens
KASKNISKNLA

SEQ ID NO: 10702 - protein, 7 aa, Homo sapiens
KASLLES

SEQ ID NO: 10703 - protein, 7 aa, Homo sapiens
KASNLEG

SEQ ID NO: 10704 - protein, 7 aa, Homo sapiens
KASNLER

SEQ ID NO: 10705 - protein, 7 aa, Homo sapiens
KASNLES

SEQ ID NO: 10706 - protein, 7 aa, Homo sapiens
KASNLET

SEQ ID NO: 10707 - protein, 11 aa, Homo sapiens
QQRSNWPPKYT

SEQ ID NO: 10708 - protein, 7 aa, Homo sapiens
KASNLQS

SEQ ID NO: 10709 - protein, 11 aa, Homo sapiens
QQRSNWPPLFT

SEQ ID NO: 10710 - protein, 11 aa, Homo sapiens
KASQDIDDDMS

SEQ ID NO: 10711 - protein, 10 aa, Homo sapiens
QQRSNWPPLT

SEQ ID NO: 10712 - protein, 11 aa, Homo sapiens
KASQSLSTSLA

SEQ ID NO: 10713 - protein, 11 aa, Homo sapiens
QQRSNWPPMYS

SEQ ID NO: 10714 - protein, 11 aa, Homo sapiens
KASQSVSKFLA

SEQ ID NO: 10715 - protein, 12 aa, Homo sapiens
QQRSNWPPSVYT

SEQ ID NO: 10716 - protein, 11 aa, Homo sapiens
KASQSVSTNLA

SEQ ID NO: 10717 - protein, 9 aa, Homo sapiens
QQRSNWPPT

SEQ ID NO: 10718 - protein, 7 aa, Homo sapiens
KASSLAS

SEQ ID NO: 10719 - protein, 11 aa, Homo sapiens
QQRSNWPPVIT

SEQ ID NO: 10720 - protein, 7 aa, Homo sapiens
KASSLDI

SEQ ID NO: 10721 - protein, 10 aa, Homo sapiens
QQRSNWPPVT

SEQ ID NO: 10722 - protein, 7 aa, Homo sapiens
KASSLEF

SEQ ID NO: 10723 - protein, 10 aa, Homo sapiens
QQRSNWPQVT

SEQ ID NO: 10724 - protein, 7 aa, Homo sapiens
KASSLEG

SEQ ID NO: 10725 - protein, 9 aa, Homo sapiens
QQRSNWPRT

SEQ ID NO: 10726 - protein, 7 aa, Homo sapiens
KASSLEN

SEQ ID NO: 10727 - protein, 7 aa, Homo sapiens
KASSLES

SEQ ID NO: 10728 - protein, 7 aa, Homo sapiens
KASSLET

SEQ ID NO: 10729 - protein, 7 aa, Homo sapiens
KASSLEY

SEQ ID NO: 10730 - protein, 7 aa, Homo sapiens
KASSLQI

SEQ ID NO: 10731 - protein, 7 aa, Homo sapiens
KASSLQS

SEQ ID NO: 10732 - protein, 7 aa, Homo sapiens
KASSLVS

SEQ ID NO: 10733 - protein, 7 aa, Homo sapiens
KASTIQS

SEQ ID NO: 10734 - protein, 7 aa, Homo sapiens
KASTLAS

SEQ ID NO: 10735 - protein, 7 aa, Homo sapiens
KASTLEN

SEQ ID NO: 10736 - protein, 7 aa, Homo sapiens
KASTLER

SEQ ID NO: 10737 - protein, 7 aa, Homo sapiens
KASTLES

SEQ ID NO: 10738 - protein, 7 aa, Homo sapiens
KASTLET

SEQ ID NO: 10739 - protein, 7 aa, Homo sapiens
KASTLHT

SEQ ID NO: 10740 - protein, 7 aa, Homo sapiens
KASTLQA

SEQ ID NO: 10741 - protein, 7 aa, Homo sapiens
KASTLQS

SEQ ID NO: 10742 - protein, 7 aa, Homo sapiens
KASTLQT

SEQ ID NO: 10743 - protein, 7 aa, Homo sapiens
KASYLDD

SEQ ID NO: 10744 - protein, 7 aa, Homo sapiens
KASYLES

SEQ ID NO: 10745 - protein, 15 aa, Homo sapiens
KATRPGSGYYYYMEV

SEQ ID NO: 10746 - protein, 7 aa, Homo sapiens
KDNERPS

SEQ ID NO: 10747 - protein, 7 aa, Homo sapiens
KDSERPS

SEQ ID NO: 10748 - protein, 7 aa, Homo sapiens
KDSERSS

SEQ ID NO: 10749 - protein, 7 aa, Homo sapiens
KDTERPS

SEQ ID NO: 10750 - protein, 7 aa, Homo sapiens
KESALQT

SEQ ID NO: 10751 - protein, 15 aa, Homo sapiens
KEYSNTGTLAGAFDI

SEQ ID NO: 10752 - protein, 5 aa, Homo sapiens
KFGID

SEQ ID NO: 10753 - protein, 5 aa, Homo sapiens
KFWIG

SEQ ID NO: 10754 - protein, 11 aa, Homo sapiens
KGGSGSYYFDS

SEQ ID NO: 10755 - protein, 18 aa, Homo sapiens
KGGYYYGSGSYSDYGMDV

SEQ ID NO: 10756 - protein, 7 aa, Homo sapiens
KGSERPS

SEQ ID NO: 10757 - protein, 5 aa, Homo sapiens
KHAIT

SEQ ID NO: 10758 - protein, 7 aa, Homo sapiens
KHNQRPS

SEQ ID NO: 10759 - protein, 5 aa, Homo sapiens
KHWMS

SEQ ID NO: 10760 - protein, 17 aa, Homo sapiens
KIIAIFHTTNYAQKLQG

SEQ ID NO: 10761 - protein, 17 aa, Homo sapiens
KIIPILGLENYAQKFQG

SEQ ID NO: 10762 - protein, 7 aa, Homo sapiens
KISKRFS

SEQ ID NO: 10763 - protein, 7 aa, Homo sapiens
KISNRDS

SEQ ID NO: 10764 - protein, 7 aa, Homo sapiens
KISNRFS

SEQ ID NO: 10765 - protein, 7 aa, Homo sapiens
KISNRVS

SEQ ID NO: 10766 - protein, 17 aa, Homo sapiens
KIVAIVNTAQYAPKFQD

SEQ ID NO: 10767 - protein, 17 aa, Homo sapiens
KIVPLFPTPTFAQKFQG

SEQ ID NO: 10768 - protein, 5 aa, Homo sapiens
KLYLH

SEQ ID NO: 10769 - protein, 5 aa, Homo sapiens
KNAIS

SEQ ID NO: 10770 - protein, 7 aa, Homo sapiens
KNDQRPS

SEQ ID NO: 10771 - protein, 7 aa, Homo sapiens
KNNKRPS

SEQ ID NO: 10772 - protein, 7 aa, Homo sapiens
KNNQRPS

SEQ ID NO: 10773 - protein, 7 aa, Homo sapiens
KNNRRPS

SEQ ID NO: 10774 - protein, 5 aa, Homo sapiens
KNWMT

SEQ ID NO: 10775 - protein, 5 aa, Homo sapiens
KNYMS

SEQ ID NO: 10776 - protein, 8 aa, Homo sapiens
KQYNNWRT

SEQ ID NO: 10777 - protein, 5 aa, Homo sapiens
KSAMT

SEQ ID NO: 10778 - protein, 16 aa, Homo sapiens
KSDQSLLHSDGKTYLS

SEQ ID NO: 10779 - protein, 5 aa, Homo sapiens
KSGFS

SEQ ID NO: 10780 - protein, 5 aa, Homo sapiens
KSGMS

SEQ ID NO: 10781 - protein, 16 aa, Homo sapiens
KSGQSLVHSDGNTYLS

SEQ ID NO: 10782 - protein, 17 aa, Homo sapiens
KSNRSLFYSRNNRDYLA

SEQ ID NO: 10783 - protein, 5 aa, Homo sapiens
KSRMS

SEQ ID NO: 10784 - protein, 16 aa, Homo sapiens
KSSESLLHSDGKTYLH

SEQ ID NO: 10785 - protein, 16 aa, Homo sapiens
KSSHSLLHSDGKTYLF

SEQ ID NO: 10786 - protein, 16 aa, Homo sapiens
KSSKSLLHSDGKTYLY

SEQ ID NO: 10787 - protein, 16 aa, Homo sapiens
KSSLSLLDSDGKTYLY

SEQ ID NO: 10788 - protein, 16 aa, Homo sapiens
KSSQGLIYIDGSTYLS

SEQ ID NO: 10789 - protein, 17 aa, Homo sapiens
KSSQGLLYRSNTKDYLA

SEQ ID NO: 10790 - protein, 17 aa, Homo sapiens
KSSQIILYSSSNRNYLA

SEQ ID NO: 10791 - protein, 17 aa, Homo sapiens
KSSQNILHSSKNKTFLA

SEQ ID NO: 10792 - protein, 17 aa, Homo sapiens
KSSQNILYDSNDKNYLA

SEQ ID NO: 10793 - protein, 17 aa, Homo sapiens
KSSQNILYSDNNKNYLA

SEQ ID NO: 10794 - protein, 17 aa, Homo sapiens
KSSQNILYSGNNENYLA

SEQ ID NO: 10795 - protein, 17 aa, Homo sapiens
KSSQNILYSSNKKNYLA

SEQ ID NO: 10796 - protein, 15 aa, Homo sapiens
KSSQNLLFNQRNYLA

SEQ ID NO: 10797 - protein, 17 aa, Homo sapiens
KSSQNLLWDSNNKDYLA

SEQ ID NO: 10798 - protein, 17 aa, Homo sapiens
KSSQNLLWDSNNKNYLA

SEQ ID NO: 10799 - protein, 17 aa, Homo sapiens
KSSQNLLYDSNNKDYLA

SEQ ID NO: 10800 - protein, 17 aa, Homo sapiens
KSSQNVLFSDNNKNYLA

SEQ ID NO: 10801 - protein, 17 aa, Homo sapiens
KSSQNVLFSSNNKNYLA

SEQ ID NO: 10802 - protein, 17 aa, Homo sapiens
KSSQNVLWDSNNKNYLA

SEQ ID NO: 10803 - protein, 17 aa, Homo sapiens
KSSQNVLYDSNKKNYLD

SEQ ID NO: 10804 - protein, 17 aa, Homo sapiens
KSSQNVLYDSNNKNYLA

SEQ ID NO: 10805 - protein, 17 aa, Homo sapiens
KSSQNVLYSENNKNYLA

SEQ ID NO: 10806 - protein, 17 aa, Homo sapiens
KSSQNVLYSSNKKNYLA

SEQ ID NO: 10807 - protein, 17 aa, Homo sapiens
KSSQNVLYSSNNKNYLA

SEQ ID NO: 10808 - protein, 16 aa, Homo sapiens
KSSQRLLHSDGKTYLF

SEQ ID NO: 10809 - protein, 17 aa, Homo sapiens
KSSQRVLYSSNSKNYVA

SEQ ID NO: 10810 - protein, 17 aa, Homo sapiens
KSSQSFLYSSNNKNHLA

SEQ ID NO: 10811 - protein, 17 aa, Homo sapiens
KSSQSIAYSSNNKNYLA

SEQ ID NO: 10812 - protein, 17 aa, Homo sapiens
KSSQSILHTSNNKNYLA

SEQ ID NO: 10813 - protein, 17 aa, Homo sapiens
KSSQSILYNSNKKNYLA

SEQ ID NO: 10814 - protein, 17 aa, Homo sapiens
KSSQSILYNSNNKNYLA

SEQ ID NO: 10815 - protein, 17 aa, Homo sapiens
KSSQSILYSSNSKNYLA

SEQ ID NO: 10816 - protein, 17 aa, Homo sapiens
KSSQSLFWSDNKKNYLA

SEQ ID NO: 10817 - protein, 17 aa, Homo sapiens
KSSQSLLFSSNNKNYLA

SEQ ID NO: 10818 - protein, 16 aa, Homo sapiens
KSSQSLLHEDGKTYLY

SEQ ID NO: 10819 - protein, 16 aa, Homo sapiens
KSSQSLLHNDGKTYLY

SEQ ID NO: 10820 - protein, 16 aa, Homo sapiens
KSSQSLLHNDGNTYLN

SEQ ID NO: 10821 - protein, 16 aa, Homo sapiens
KSSQSLLHQDGKTYLY

SEQ ID NO: 10822 - protein, 16 aa, Homo sapiens
KSSQSLLHRDGKTYLY

SEQ ID NO: 10823 - protein, 16 aa, Homo sapiens
KSSQSLLHSDGKSYLS

SEQ ID NO: 10824 - protein, 16 aa, Homo sapiens
KSSQSLLHSDGKTHLY

SEQ ID NO: 10825 - protein, 16 aa, Homo sapiens
KSSQSLLHSDGKTYFY

SEQ ID NO: 10826 - protein, 16 aa, Homo sapiens
KSSQSLLHSDGKTYLC

SEQ ID NO: 10827 - protein, 16 aa, Homo sapiens
KSSQSLLHSDGKTYLD

SEQ ID NO: 10828 - protein, 16 aa, Homo sapiens
KSSQSLLHSDGKTYLF

SEQ ID NO: 10829 - protein, 16 aa, Homo sapiens
KSSQSLLHSDGKTYLS

SEQ ID NO: 10830 - protein, 16 aa, Homo sapiens
KSSQSLLHSDGKTYLY

SEQ ID NO: 10831 - protein, 16 aa, Homo sapiens
KSSQSLLHSDGNTYLN

SEQ ID NO: 10832 - protein, 16 aa, Homo sapiens
KSSQSLLHSDGNTYLY

SEQ ID NO: 10833 - protein, 16 aa, Homo sapiens
KSSQSLLHSNGKTYLY

SEQ ID NO: 10834 - protein, 16 aa, Homo sapiens
KSSQSLLHSNGYNHLD

SEQ ID NO: 10835 - protein, 16 aa, Homo sapiens
KSSQSLLHSNGYNYLV

SEQ ID NO: 10836 - protein, 16 aa, Homo sapiens
KSSQSLLHTDGKTYLF

SEQ ID NO: 10837 - protein, 16 aa, Homo sapiens
KSSQSLLHTDGKTYLH

SEQ ID NO: 10838 - protein, 16 aa, Homo sapiens
KSSQSLLHTDGKTYLS

SEQ ID NO: 10839 - protein, 16 aa, Homo sapiens
KSSQSLLHTDGKTYLY

SEQ ID NO: 10840 - protein, 16 aa, Homo sapiens
KSSQSLLHTDGKTYMS

SEQ ID NO: 10841 - protein, 16 aa, Homo sapiens
KSSQSLLHTNGKTYLY

SEQ ID NO: 10842 - protein, 17 aa, Homo sapiens
KSSQSLLYDSNNLNYLV

SEQ ID NO: 10843 - protein, 17 aa, Homo sapiens
KSSQSLLYNSNKKNYLA

SEQ ID NO: 10844 - protein, 17 aa, Homo sapiens
KSSQSLLYRSNNKNYLA

SEQ ID NO: 10845 - protein, 16 aa, Homo sapiens
KSSQSLLYSNGYTYLE

SEQ ID NO: 10846 - protein, 17 aa, Homo sapiens
KSSQSLLYSSNKKNYLA

SEQ ID NO: 10847 - protein, 17 aa, Homo sapiens
KSSQSLLYSSNNKNYLA

SEQ ID NO: 10848 - protein, 17 aa, Homo sapiens
KSSQSLLYSSNTKNYLA

SEQ ID NO: 10849 - protein, 16 aa, Homo sapiens
KSSQSLVHTDGKTYLS

SEQ ID NO: 10850 - protein, 16 aa, Homo sapiens
KSSQSLVYSDGDTYLI

SEQ ID NO: 10851 - protein, 16 aa, Homo sapiens
KSSQSPLHTDGKTYLY

SEQ ID NO: 10852 - protein, 17 aa, Homo sapiens
KSSQSVFFDRTNQNYLA

SEQ ID NO: 10853 - protein, 17 aa, Homo sapiens
KSSQSVFWDSNKKNYLA

SEQ ID NO: 10854 - protein, 17 aa, Homo sapiens
KSSQSVFWESNKKNYLA

SEQ ID NO: 10855 - protein, 17 aa, Homo sapiens
KSSQSVFYKSNKRNYLA

SEQ ID NO: 10856 - protein, 17 aa, Homo sapiens
KSSQSVFYSSNNKNYLG

SEQ ID NO: 10857 - protein, 17 aa, Homo sapiens
KSSQSVLFDSNGKNYLA

SEQ ID NO: 10858 - protein, 17 aa, Homo sapiens
KSSQSVLFNSNNNNYLA

SEQ ID NO: 10859 - protein, 17 aa, Homo sapiens
KSSQSVLFSSNNKNYLA

SEQ ID NO: 10860 - protein, 17 aa, Homo sapiens
KSSQSVLHNSNNKNYLA

SEQ ID NO: 10861 - protein, 16 aa, Homo sapiens
KSSQSVLHSDGKTYLY

SEQ ID NO: 10862 - protein, 17 aa, Homo sapiens
KSSQSVLHSSNNKNFLG

SEQ ID NO: 10863 - protein, 17 aa, Homo sapiens
KSSQSVLSTSKNKNFLA

SEQ ID NO: 10864 - protein, 17 aa, Homo sapiens
KSSQSVLWNDNNKNYLA

SEQ ID NO: 10865 - protein, 17 aa, Homo sapiens
KSSQSVLWSSNKKNYLG

SEQ ID NO: 10866 - protein, 16 aa, Homo sapiens
KSSQSVLYANSKNYLA

SEQ ID NO: 10867 - protein, 17 aa, Homo sapiens
KSSQSVLYDSNKKNYLA

SEQ ID NO: 10868 - protein, 17 aa, Homo sapiens
KSSQSVLYDSNNKDYLA

SEQ ID NO: 10869 - protein, 17 aa, Homo sapiens
KSSQSVLYDSNNKNYLA

SEQ ID NO: 10870 - protein, 17 aa, Homo sapiens
KSSQSVLYDSNNNNYLA

SEQ ID NO: 10871 - protein, 17 aa, Homo sapiens
KSSQSVLYKKKKKNYFA

SEQ ID NO: 10872 - protein, 17 aa, Homo sapiens
KSSQSVLYKSNNKNYLA

SEQ ID NO: 10873 - protein, 17 aa, Homo sapiens
KSSQSVLYNDNKKNYLA

SEQ ID NO: 10874 - protein, 17 aa, Homo sapiens
KSSQSVLYNSDNKNYLA

SEQ ID NO: 10875 - protein, 17 aa, Homo sapiens
KSSQSVLYNSNKKNYLA

SEQ ID NO: 10876 - protein, 17 aa, Homo sapiens
KSSQSVLYNSNKWNYLA

SEQ ID NO: 10877 - protein, 17 aa, Homo sapiens
KSSQSVLYNSNNKDYLA

SEQ ID NO: 10878 - protein, 17 aa, Homo sapiens
KSSQSVLYNSNNKNYLA

SEQ ID NO: 10879 - protein, 17 aa, Homo sapiens
KSSQSVLYNSNNKNYLG

SEQ ID NO: 10880 - protein, 17 aa, Homo sapiens
KSSQSVLYNSNNLNYLG

SEQ ID NO: 10881 - protein, 17 aa, Homo sapiens
KSSQSVLYRSNNKNYLA

SEQ ID NO: 10882 - protein, 17 aa, Homo sapiens
KSSQSVLYSPNNKNYLA

SEQ ID NO: 10883 - protein, 17 aa, Homo sapiens
KSSQSVLYSSDNNNYFA

SEQ ID NO: 10884 - protein, 17 aa, Homo sapiens
KSSQSVLYSSNDKNYLA

SEQ ID NO: 10885 - protein, 17 aa, Homo sapiens
KSSQSVLYSSNEKNYLA

SEQ ID NO: 10886 - protein, 17 aa, Homo sapiens
KSSQSVLYSSNKKNYLA

SEQ ID NO: 10887 - protein, 17 aa, Homo sapiens
KSSQSVLYSSNKKNYLS

SEQ ID NO: 10888 - protein, 17 aa, Homo sapiens
KSSQSVLYSSNNKDYLA

SEQ ID NO: 10889 - protein, 17 aa, Homo sapiens
KSSQSVLYSSNNKNCLA

SEQ ID NO: 10890 - protein, 17 aa, Homo sapiens
KSSQSVLYSSNNKNYLA

SEQ ID NO: 10891 - protein, 17 aa, Homo sapiens
KSSQSVLYSSNNKNYLG

SEQ ID NO: 10892 - protein, 17 aa, Homo sapiens
KSSQSVLYSSNNKNYLS

SEQ ID NO: 10893 - protein, 17 aa, Homo sapiens
KSSQSVLYSSNNNNYLA

SEQ ID NO: 10894 - protein, 17 aa, Homo sapiens
KSSQSVLYSSNNQNYLA

SEQ ID NO: 10895 - protein, 17 aa, Homo sapiens
KSSQSVLYSSNQRNYLA

SEQ ID NO: 10896 - protein, 17 aa, Homo sapiens
KSSQSVLYSSNSENSLA

SEQ ID NO: 10897 - protein, 17 aa, Homo sapiens
KSSQSVLYSSRNKDYLA

SEQ ID NO: 10898 - protein, 17 aa, Homo sapiens
KSSQSVLYSSSNKNFLA

SEQ ID NO: 10899 - protein, 17 aa, Homo sapiens
KSSQSVLYTSNKKNYLA

SEQ ID NO: 10900 - protein, 17 aa, Homo sapiens
KSSQSVLYTSSNKNYLA

SEQ ID NO: 10901 - protein, 17 aa, Homo sapiens
KSSQSVSYISNNKNYLA

SEQ ID NO: 10902 - protein, 16 aa, Homo sapiens
KSSQTLLHSDGKTYLY

SEQ ID NO: 10903 - protein, 16 aa, Homo sapiens
KSSQTLLHSDGTTSLY

SEQ ID NO: 10904 - protein, 17 aa, Homo sapiens
KSSQTVLYNSNNKNYLA

SEQ ID NO: 10905 - protein, 17 aa, Homo sapiens
KSSQTVLYSSNNYNYLA

SEQ ID NO: 10906 - protein, 17 aa, Homo sapiens
KSSQTVLYTSNNKNYLA

SEQ ID NO: 10907 - protein, 17 aa, Homo sapiens
KSSRTLLYNPNNKMFLT

SEQ ID NO: 10908 - protein, 7 aa, Homo sapiens
KSSTLES

SEQ ID NO: 10909 - protein, 17 aa, Homo sapiens
KSTQSVLYDSNNRNYLA

SEQ ID NO: 10910 - protein, 17 aa, Homo sapiens
KSTQSVLYSSNNMNYLA

SEQ ID NO: 10911 - protein, 7 aa, Homo sapiens
KTKKRPS

SEQ ID NO: 10912 - protein, 7 aa, Homo sapiens
KTSNLDS

SEQ ID NO: 10913 - protein, 7 aa, Homo sapiens
KTSNLEG

SEQ ID NO: 10914 - protein, 17 aa, Homo sapiens
KTSQSVLWDSNERNYLA

SEQ ID NO: 10915 - protein, 17 aa, Homo sapiens
KTSQSVLYPGNNENSLA

SEQ ID NO: 10916 - protein, 17 aa, Homo sapiens
KTSQSVYYDSNKMNYLA

SEQ ID NO: 10917 - protein, 7 aa, Homo sapiens
KTSSLES

SEQ ID NO: 10918 - protein, 7 aa, Homo sapiens
KTSTLES

SEQ ID NO: 10919 - protein, 5 aa, Homo sapiens
KTYMS

SEQ ID NO: 10920 - protein, 15 aa, Homo sapiens
KVDHIVGAPGEFFDT

SEQ ID NO: 10921 - protein, 7 aa, Homo sapiens
KVSDRDS

SEQ ID NO: 10922 - protein, 7 aa, Homo sapiens
KVSDRFS

SEQ ID NO: 10923 - protein, 7 aa, Homo sapiens
KVSHRDS

SEQ ID NO: 10924 - protein, 7 aa, Homo sapiens
KVSKRDS

SEQ ID NO: 10925 - protein, 7 aa, Homo sapiens
KVSKWDS

SEQ ID NO: 10926 - protein, 7 aa, Homo sapiens
KVSNRDS

SEQ ID NO: 10927 - protein, 7 aa, Homo sapiens
KVSNRES

SEQ ID NO: 10928 - protein, 7 aa, Homo sapiens
KVSNWDS

SEQ ID NO: 10929 - protein, 7 aa, Homo sapiens
KVSSRDS

SEQ ID NO: 10930 - protein, 7 aa, Homo sapiens
KVSTLES

SEQ ID NO: 10931 - protein, 7 aa, Homo sapiens
KVSVRDS

SEQ ID NO: 10932 - protein, 7 aa, Homo sapiens
KVSYRDS

SEQ ID NO: 10933 - protein, 5 aa, Homo sapiens
KYAFN

SEQ ID NO: 10934 - protein, 5 aa, Homo sapiens
KYAIN

SEQ ID NO: 10935 - protein, 5 aa, Homo sapiens
KYAIS

SEQ ID NO: 10936 - protein, 5 aa, Homo sapiens
KYALN

SEQ ID NO: 10937 - protein, 5 aa, Homo sapiens
KYAMN

SEQ ID NO: 10938 - protein, 5 aa, Homo sapiens
KYAMS

SEQ ID NO: 10939 - protein, 5 aa, Homo sapiens
KYAMT

SEQ ID NO: 10940 - protein, 5 aa, Homo sapiens
KYCMS

SEQ ID NO: 10941 - protein, 15 aa, Homo sapiens
KYCSSTSCYGGHFDY

SEQ ID NO: 10942 - protein, 5 aa, Homo sapiens
KYGID

SEQ ID NO: 10943 - protein, 5 aa, Homo sapiens
KYGIN

SEQ ID NO: 10944 - protein, 5 aa, Homo sapiens
KYGIS

SEQ ID NO: 10945 - protein, 5 aa, Homo sapiens
KYGLS

SEQ ID NO: 10946 - protein, 5 aa, Homo sapiens
KYGMN

SEQ ID NO: 10947 - protein, 5 aa, Homo sapiens
KYGMS

SEQ ID NO: 10948 - protein, 5 aa, Homo sapiens
KYWIG

SEQ ID NO: 10949 - protein, 5 aa, Homo sapiens
KYWMI

SEQ ID NO: 10950 - protein, 5 aa, Homo sapiens
KYWMN

SEQ ID NO: 10951 - protein, 5 aa, Homo sapiens
KYWMS

SEQ ID NO: 10952 - protein, 5 aa, Homo sapiens
KYWMT

SEQ ID NO: 10953 - protein, 5 aa, Homo sapiens
KYWVG

SEQ ID NO: 10954 - protein, 11 aa, Homo sapiens
LAGGSFFWFDP

SEQ ID NO: 10955 - protein, 7 aa, Homo sapiens
LAGIQGI

SEQ ID NO: 10956 - protein, 10 aa, Homo sapiens
LAGTVGAFDI

SEQ ID NO: 10957 - protein, 13 aa, Homo sapiens
LAGYYYYYYYMDV

SEQ ID NO: 10958 - protein, 15 aa, Homo sapiens
LAPPLTTRTTYWFDP

SEQ ID NO: 10959 - protein, 7 aa, Homo sapiens
LASIRAS

SEQ ID NO: 10960 - protein, 7 aa, Homo sapiens
LASNRAS

SEQ ID NO: 10961 - protein, 7 aa, Homo sapiens
LASSRAS

SEQ ID NO: 10962 - protein, 13 aa, Homo sapiens
LATLVGYYYYADV

SEQ ID NO: 10963 - protein, 12 aa, Homo sapiens
LCPDTAYRPVDF

SEQ ID NO: 10964 - protein, 11 aa, Homo sapiens
LDDSSGYPVWY

SEQ ID NO: 10965 - protein, 17 aa, Homo sapiens
LDRYCTKTSCFGSWFDP

SEQ ID NO: 10966 - protein, 7 aa, Homo sapiens
LDSERPS

SEQ ID NO: 10967 - protein, 7 aa, Homo sapiens
LDSNRAS

SEQ ID NO: 10968 - protein, 11 aa, Homo sapiens
LEGSGSYNKGS

SEQ ID NO: 10969 - protein, 17 aa, Homo sapiens
LEKRIALAGGKRIWFDP

SEQ ID NO: 10970 - protein, 12 aa, Homo sapiens
LERSYYPKYLQD

SEQ ID NO: 10971 - protein, 94 aa, Homo sapiens
LESGGDLVQPGGSLRLSCGASGFTFGSCAMNWVRQAPGKGLEWVSVISDSGDKTYYADSVKGRFTISRDNSKNTLYLQMNSLRGEDTAVYYCAK

SEQ ID NO: 10972 - protein, 120 aa, Homo sapiens
LESGGDLVQPGGSLRLSCGASGFTFGSCAMNWVRQAPGKGLEWVSVISDSGDKTYYADSVKGRFTISRDNSKNTLYLQMNSLRGEDTAVYYCAKGLYWDGSSCYRSVDWWGQGTLVTVSS

SEQ ID NO: 10973 - protein, 14 aa, Homo sapiens
LFLYEDSGYRNFDY

SEQ ID NO: 10974 - protein, 11 aa, Homo sapiens
LFWSGQSYFDS

SEQ ID NO: 10975 - protein, 16 aa, Homo sapiens
LGFADRSSTAYRHADC

SEQ ID NO: 10976 - protein, 7 aa, Homo sapiens
LGFDRAS

SEQ ID NO: 10977 - protein, 12 aa, Homo sapiens
LGGVSARNPTDY

SEQ ID NO: 10978 - protein, 15 aa, Homo sapiens
LGGYHLLRSRSWLDP

SEQ ID NO: 10979 - protein, 19 aa, Homo sapiens
LGPTTRQGPTRRAPSAMDV

SEQ ID NO: 10980 - protein, 19 aa, Homo sapiens
LGPTTRQGPTRRAPSAMDV

SEQ ID NO: 10981 - protein, 15 aa, Homo sapiens
LGRVVVAAHPTPPVY

SEQ ID NO: 10982 - protein, 7 aa, Homo sapiens
LGSARAS

SEQ ID NO: 10983 - protein, 7 aa, Homo sapiens
LGSDRAS

SEQ ID NO: 10984 - protein, 7 aa, Homo sapiens
LGSHRAS

SEQ ID NO: 10985 - protein, 7 aa, Homo sapiens
LGSIRAS

SEQ ID NO: 10986 - protein, 7 aa, Homo sapiens
LGSNLQG

SEQ ID NO: 10987 - protein, 7 aa, Homo sapiens
LGSNRAS

SEQ ID NO: 10988 - protein, 16 aa, Homo sapiens
LGSPGVSTNNYGYFDS

SEQ ID NO: 10989 - protein, 9 aa, Homo sapiens
LGSSSWYDY

SEQ ID NO: 10990 - protein, 7 aa, Homo sapiens
LGSTRAS

SEQ ID NO: 10991 - protein, 21 aa, Homo sapiens
LGTAAAGSRLRYSYHYYYMDV

SEQ ID NO: 10992 - protein, 13 aa, Homo sapiens
LGVNPALSGSLDS

SEQ ID NO: 10993 - protein, 20 aa, Homo sapiens
LGYCSGGSCSQYYYYYGMDV

SEQ ID NO: 10994 - protein, 17 aa, Homo sapiens
LGYCSSTSCSAGAQFDY

SEQ ID NO: 10995 - protein, 15 aa, Homo sapiens
LHQDEGVTGYRAIES

SEQ ID NO: 10996 - protein, 8 aa, Homo sapiens
LHYDYSWT

SEQ ID NO: 10997 - protein, 9 aa, Homo sapiens
LHYGTSSWT

SEQ ID NO: 10998 - protein, 8 aa, Homo sapiens
LHYNYWWT

SEQ ID NO: 10999 - protein, 17 aa, Homo sapiens
LIDAENGETVYAEKFRG

SEQ ID NO: 11000 - protein, 17 aa, Homo sapiens
LIDPEDAKTMYAKKFQG

SEQ ID NO: 11001 - protein, 17 aa, Homo sapiens
LIDPEDGEAIYAAKFQG

SEQ ID NO: 11002 - protein, 17 aa, Homo sapiens
LIDPEDGEREYAEKFQG

SEQ ID NO: 11003 - protein, 17 aa, Homo sapiens
LIDPEDGKTMYAGKFQG

SEQ ID NO: 11004 - protein, 17 aa, Homo sapiens
LIDPEVDETQYAEKFQG

SEQ ID NO: 11005 - protein, 17 aa, Homo sapiens
LIDPEVDETQYTEKFQG

SEQ ID NO: 11006 - protein, 16 aa, Homo sapiens
LIFSDDEKSYSPSLSS

SEQ ID NO: 11007 - protein, 16 aa, Homo sapiens
LIFSDDEKSYSTSLKS

SEQ ID NO: 11008 - protein, 16 aa, Homo sapiens
LIFSDDEKSYSTSLRS

SEQ ID NO: 11009 - protein, 16 aa, Homo sapiens
LIFWDGAEHYIPSLRN

SEQ ID NO: 11010 - protein, 19 aa, Homo sapiens
LIKSGANTYATEYAAAVRG

SEQ ID NO: 11011 - protein, 17 aa, Homo sapiens
LINWDGSDTYYSDSVEG

SEQ ID NO: 11012 - protein, 17 aa, Homo sapiens
LISDDGTRIYYADSVKG

SEQ ID NO: 11013 - protein, 17 aa, Homo sapiens
LISFDGSITYYADSVKG

SEQ ID NO: 11014 - protein, 17 aa, Homo sapiens
LISFDGTNKNYADSVKG

SEQ ID NO: 11015 - protein, 17 aa, Homo sapiens
LISGDGGSTYYVDSVKG

SEQ ID NO: 11016 - protein, 17 aa, Homo sapiens
LISSDASKTYYADSVKG

SEQ ID NO: 11017 - protein, 17 aa, Homo sapiens
LISSDGTNKEYADPVKG

SEQ ID NO: 11018 - protein, 17 aa, Homo sapiens
LISSNGGSPYYADFVKG

SEQ ID NO: 11019 - protein, 17 aa, Homo sapiens
LISSNGQKKNYAVSVKG

SEQ ID NO: 11020 - protein, 17 aa, Homo sapiens
LISWDGDSTYYADSVKG

SEQ ID NO: 11021 - protein, 17 aa, Homo sapiens
LISWDGGSTYYADSVKG

SEQ ID NO: 11022 - protein, 17 aa, Homo sapiens
LISYDAKDKFYADSVQG

SEQ ID NO: 11023 - protein, 17 aa, Homo sapiens
LISYDEKDKFYADSVQG

SEQ ID NO: 11024 - protein, 17 aa, Homo sapiens
LISYDGSEKYYADSVKG

SEQ ID NO: 11025 - protein, 17 aa, Homo sapiens
LISYDGSKKYYADSVKG

SEQ ID NO: 11026 - protein, 17 aa, Homo sapiens
LISYDGSNKYYADSVKG

SEQ ID NO: 11027 - protein, 17 aa, Homo sapiens
LISYDGTNKNYADSVKG

SEQ ID NO: 11028 - protein, 17 aa, Homo sapiens
LISYDGTNKYYADSVKG

SEQ ID NO: 11029 - protein, 17 aa, Homo sapiens
LITGDGGVTYYPDSVKG

SEQ ID NO: 11030 - protein, 9 aa, Homo sapiens
LIWHSNTYV

SEQ ID NO: 11031 - protein, 17 aa, Homo sapiens
LIWYDGSHKEYADFVKG

SEQ ID NO: 11032 - protein, 17 aa, Homo sapiens
LIWYDGSNKDYADSVKG

SEQ ID NO: 11033 - protein, 16 aa, Homo sapiens
LIYPSGSTSYNSSLNS

SEQ ID NO: 11034 - protein, 16 aa, Homo sapiens
LIYSGGLTYYIDSVKG

SEQ ID NO: 11035 - protein, 16 aa, Homo sapiens
LIYTSGSTNYNPSLKS

SEQ ID NO: 11036 - protein, 16 aa, Homo sapiens
LIYWDDDKRYRPSLKS

SEQ ID NO: 11037 - protein, 16 aa, Homo sapiens
LIYWDDDKRYSPSLKS

SEQ ID NO: 11038 - protein, 16 aa, Homo sapiens
LIYWDNDKLYSPSLES

SEQ ID NO: 11039 - protein, 16 aa, Homo sapiens
LIYWNDDKRYSPSLKS

SEQ ID NO: 11040 - protein, 16 aa, Homo sapiens
LIYWNDGNRYSPSLKN

SEQ ID NO: 11041 - protein, 15 aa, Homo sapiens
LKDHYGSGSPEFFHH

SEQ ID NO: 11042 - protein, 14 aa, Homo sapiens
LKYCGADCRFVFEY

SEQ ID NO: 11043 - protein, 9 aa, Homo sapiens
LLAYSGTWV

SEQ ID NO: 11044 - protein, 95 aa, Homo sapiens
LLESGGGLVQPGGSLRLSCAASGFRFSSSAMSWVRQAPGKGLEWVSFISNSGLSTYYADSVKGRFTISRDTSKNTLYLRMSGLRVEDTAVYFCAK

SEQ ID NO: 11045 - protein, 120 aa, Homo sapiens
LLESGGGLVQPGGSLRLSCAASGFRFSSSAMSWVRQAPGKGLEWVSFISNSGLSTYYADSVKGRFTISRDTSKNTLYLRMSGLRVEDTAVYFCAKDRAVVVPDRGSMDVWGRGTTVTVSS

SEQ ID NO: 11046 - protein, 97 aa, Homo sapiens
LLESGGGMVQPGGSLTLSCAASAFTFRSYEMNWVRQAPGKGPEWVAYISSRGGGSTVYYADSVKGRFSISRDNDKNSLFLQMDSLRGDDTGIYYCVR

SEQ ID NO: 11047 - protein, 113 aa, Homo sapiens
LLESGGGMVQPGGSLTLSCAASAFTFRSYEMNWVRQAPGKGPEWVAYISSRGGGSTVYYADSVKGRFSISRDNDKNSLFLQMDSLRGDDTGIYYCVRADYMDVWGLGTTVSVS

SEQ ID NO: 11048 - protein, 8 aa, Homo sapiens
LLGARFDY

SEQ ID NO: 11049 - protein, 16 aa, Homo sapiens
LLKKGVDWNPHLYFDY

SEQ ID NO: 11050 - protein, 10 aa, Homo sapiens
LLSFNNDYFV

SEQ ID NO: 11051 - protein, 14 aa, Homo sapiens
LLSYEISTYRPLDS

SEQ ID NO: 11052 - protein, 9 aa, Homo sapiens
LLSYNGARV

SEQ ID NO: 11053 - protein, 10 aa, Homo sapiens
LLSYSGARPL

SEQ ID NO: 11054 - protein, 9 aa, Homo sapiens
LLSYSGAVV

SEQ ID NO: 11055 - protein, 13 aa, Homo sapiens
LLTGYYNDWYLDL

SEQ ID NO: 11056 - protein, 14 aa, Homo sapiens
LLVNKGRNSSLIDC

SEQ ID NO: 11057 - protein, 11 aa, Homo sapiens
LLVYSVDRPGV

SEQ ID NO: 11058 - protein, 9 aa, Homo sapiens
LLYCDGAWV

SEQ ID NO: 11059 - protein, 16 aa, Homo sapiens
LLYPDGKTYYADSVRG

SEQ ID NO: 11060 - protein, 9 aa, Homo sapiens
LLYYGGAWV

SEQ ID NO: 11061 - protein, 8 aa, Homo sapiens
LLYYGGWV

SEQ ID NO: 11062 - protein, 15 aa, Homo sapiens
LMIAVTGSQEVFPGY

SEQ ID NO: 11063 - protein, 16 aa, Homo sapiens
LMISFGGVFRDDAFDI

SEQ ID NO: 11064 - protein, 16 aa, Homo sapiens
LMITFGGIIRDDAFDI

SEQ ID NO: 11065 - protein, 17 aa, Homo sapiens
LMSPDGSRKYYAESVKG

SEQ ID NO: 11066 - protein, 9 aa, Homo sapiens
LMWHRNTYV

SEQ ID NO: 11067 - protein, 5 aa, Homo sapiens
LNALH

SEQ ID NO: 11068 - protein, 12 aa, Homo sapiens
LNCIIASCPLDY

SEQ ID NO: 11069 - protein, 11 aa, Homo sapiens
LNGDGSHSNGD

SEQ ID NO: 11070 - protein, 11 aa, Homo sapiens
LNPDGSHDKGD

SEQ ID NO: 11071 - protein, 11 aa, Homo sapiens
LNSDGSHFKGD

SEQ ID NO: 11072 - protein, 11 aa, Homo sapiens
LNSDGSHIKGD

SEQ ID NO: 11073 - protein, 11 aa, Homo sapiens
LNSDGSHSKGD

SEQ ID NO: 11074 - protein, 11 aa, Homo sapiens
LNSDGSHTKGD

SEQ ID NO: 11075 - protein, 14 aa, Homo sapiens
LNSERLRFLPYMDV

SEQ ID NO: 11076 - protein, 11 aa, Homo sapiens
LNSGWYSYFDY

SEQ ID NO: 11077 - protein, 11 aa, Homo sapiens
LNSWHSAPMDV

SEQ ID NO: 11078 - protein, 23 aa, Homo sapiens
LPRPKLLLWFGGSNTSFDYDTDV

SEQ ID NO: 11079 - protein, 8 aa, Homo sapiens
LQCNPYYR

SEQ ID NO: 11080 - protein, 9 aa, Homo sapiens
LQDNEYPFS

SEQ ID NO: 11081 - protein, 9 aa, Homo sapiens
LQDYNHPLT

SEQ ID NO: 11082 - protein, 9 aa, Homo sapiens
LQDYNYPRT

SEQ ID NO: 11083 - protein, 9 aa, Homo sapiens
LQDYNYPWT

SEQ ID NO: 11084 - protein, 9 aa, Homo sapiens
LQDYNYPYT

SEQ ID NO: 11085 - protein, 8 aa, Homo sapiens
LQGSQFYS

SEQ ID NO: 11086 - protein, 9 aa, Homo sapiens
LQHFNYPFT

SEQ ID NO: 11087 - protein, 9 aa, Homo sapiens
LQHHNFPRT

SEQ ID NO: 11088 - protein, 9 aa, Homo sapiens
LQHIIYPWT

SEQ ID NO: 11089 - protein, 9 aa, Homo sapiens
LQHKSYPLH

SEQ ID NO: 11090 - protein, 9 aa, Homo sapiens
LQHKSYPLT

SEQ ID NO: 11091 - protein, 9 aa, Homo sapiens
LQHKSYPRT

SEQ ID NO: 11092 - protein, 9 aa, Homo sapiens
LQHNSYPFT

SEQ ID NO: 11093 - protein, 9 aa, Homo sapiens
LQHNSYPPT

SEQ ID NO: 11094 - protein, 9 aa, Homo sapiens
LQHNSYPRT

SEQ ID NO: 11095 - protein, 8 aa, Homo sapiens
LQHNSYPS

SEQ ID NO: 11096 - protein, 9 aa, Homo sapiens
LQHNSYPWA

SEQ ID NO: 11097 - protein, 9 aa, Homo sapiens
LQHSTYPLT

SEQ ID NO: 11098 - protein, 9 aa, Homo sapiens
LQHTTYLWT

SEQ ID NO: 11099 - protein, 9 aa, Homo sapiens
LQHYNYPLT

SEQ ID NO: 11100 - protein, 12 aa, Homo sapiens
LQPDTGFRPVDF

SEQ ID NO: 11101 - protein, 10 aa, Homo sapiens
LQRSNWPPLT

SEQ ID NO: 11102 - protein, 10 aa, Homo sapiens
LQRSNWPSIT

SEQ ID NO: 11103 - protein, 9 aa, Homo sapiens
LQRSNWQYT

SEQ ID NO: 11104 - protein, 9 aa, Homo sapiens
LQTYDTSHT

SEQ ID NO: 11105 - protein, 12 aa, Homo sapiens
LQVETGYRPCQD

SEQ ID NO: 11106 - protein, 9 aa, Homo sapiens
LQYDTYPRA

SEQ ID NO: 11107 - protein, 9 aa, Homo sapiens
LQYESYSET

SEQ ID NO: 11108 - protein, 9 aa, Homo sapiens
LQYKSDSYT

SEQ ID NO: 11109 - protein, 10 aa, Homo sapiens
LQYNTYHMYT

SEQ ID NO: 11110 - protein, 9 aa, Homo sapiens
LQYYSYPPT

SEQ ID NO: 11111 - protein, 12 aa, Homo sapiens
LREDTAYRPCDQ

SEQ ID NO: 11112 - protein, 14 aa, Homo sapiens
LREYADHYVGRFDF

SEQ ID NO: 11113 - protein, 8 aa, Homo sapiens
LRGAAFDY

SEQ ID NO: 11114 - protein, 8 aa, Homo sapiens
LRGHVFDI

SEQ ID NO: 11115 - protein, 8 aa, Homo sapiens
LRGTAFDV

SEQ ID NO: 11116 - protein, 15 aa, Homo sapiens
LRPGVARVRYSGLDV

SEQ ID NO: 11117 - protein, 19 aa, Homo sapiens
LRRRKEEEDYSGIYEAFDI

SEQ ID NO: 11118 - protein, 10 aa, Homo sapiens
LSDYYYGMDV

SEQ ID NO: 11119 - protein, 4 aa, Homo sapiens
LSGD

SEQ ID NO: 11120 - protein, 11 aa, Homo sapiens
LSGYDSGYYSS

SEQ ID NO: 11121 - protein, 16 aa, Homo sapiens
LSHWLERGNLAGAFDI

SEQ ID NO: 11122 - protein, 13 aa, Homo sapiens
LSKGHYYYHYMDV

SEQ ID NO: 11123 - protein, 19 aa, Homo sapiens
LSPRHYDVVSGYYGYAFQI

SEQ ID NO: 11124 - protein, 13 aa, Homo sapiens
LSQGHYYYRYMDV

SEQ ID NO: 11125 - protein, 17 aa, Homo sapiens
LSRPHRDSAGGYSPFDY

SEQ ID NO: 11126 - protein, 7 aa, Homo sapiens
LSSNRAS

SEQ ID NO: 11127 - protein, 11 aa, Homo sapiens
LSWDDRLSAWV

SEQ ID NO: 11128 - protein, 10 aa, Homo sapiens
LSYAGSSNWV

SEQ ID NO: 11129 - protein, 14 aa, Homo sapiens
LSYGDFVLENWFDP

SEQ ID NO: 11130 - protein, 12 aa, Homo sapiens
LTPDTCYRPLDC

SEQ ID NO: 11131 - protein, 20 aa, Homo sapiens
LTPELGYCSGANCPRYYMDV

SEQ ID NO: 11132 - protein, 16 aa, Homo sapiens
LTSVTSSNSGFDAFDF

SEQ ID NO: 11133 - protein, 11 aa, Homo sapiens
LTWDNGLKAWV

SEQ ID NO: 11134 - protein, 10 aa, Homo sapiens
LVAFPQIPDY

SEQ ID NO: 11135 - protein, 17 aa, Homo sapiens
LVDPEDGETIYAEKFQG

SEQ ID NO: 11136 - protein, 17 aa, Homo sapiens
LVDPEDGKTMYAGKFQG

SEQ ID NO: 11137 - protein, 17 aa, Homo sapiens
LVFPGDSDTRYSPSFQG

SEQ ID NO: 11138 - protein, 16 aa, Homo sapiens
LVKRLSLNIVLYAFDF

SEQ ID NO: 11139 - protein, 95 aa, Homo sapiens
LVQSGAEVKKPGASVKVSCKTSDYTFTAYGITWVRQAPGQSLEWMGWISTSNGNTNYAQKFQGRVTMTTETSTTTAYMELRSLRFDDTAVYYCAR

SEQ ID NO: 11140 - protein, 116 aa, Homo sapiens
LVQSGAEVKKPGASVKVSCKTSDYTFTAYGITWVRQAPGQSLEWMGWISTSNGNTNYAQKFQGRVTMTTETSTTTAYMELRSLRFDDTAVYYCARGGAAADWLNPWGQGTLVTVSS

SEQ ID NO: 11141 - protein, 96 aa, Homo sapiens
LVQSGGDLVQPGGSLRLSCVASGFRFNNYAMGWVRQAPGKGLEWVSSISGHRDANTYYAESVKGRFTISRDNSRNTLYLQMNSLRAEDTAVYYCAR

SEQ ID NO: 11142 - protein, 118 aa, Homo sapiens
LVQSGGDLVQPGGSLRLSCVASGFRFNNYAMGWVRQAPGKGLEWVSSISGHRDANTYYAESVKGRFTISRDNSRNTLYLQMNSLRAEDTAVYYCARGTDSAATRVDAWGQGTTVTVSS

SEQ ID NO: 11143 - protein, 14 aa, Homo sapiens
LVRGGGYNWGAFDY

SEQ ID NO: 11144 - protein, 7 aa, Homo sapiens
LVSNLQS

SEQ ID NO: 11145 - protein, 10 aa, Homo sapiens
LVSYSDGRRV

SEQ ID NO: 11146 - protein, 16 aa, Homo sapiens
LVYWDDDKRYSPSLKS

SEQ ID NO: 11147 - protein, 16 aa, Homo sapiens
LVYWDDDKRYSPSLRS

SEQ ID NO: 11148 - protein, 6 aa, Homo sapiens
LWEGGY

SEQ ID NO: 11149 - protein, 8 aa, Homo sapiens
LWEGIATF

SEQ ID NO: 11150 - protein, 8 aa, Homo sapiens
LWEGIGSF

SEQ ID NO: 11151 - protein, 4 aa, Homo sapiens
LWMM

SEQ ID NO: 11152 - protein, 14 aa, Homo sapiens
LYLFEDSGYRSIDY

SEQ ID NO: 11153 - protein, 6 aa, Homo sapiens
LYPDDY

SEQ ID NO: 11154 - protein, 5 aa, Homo sapiens
LYPIT

SEQ ID NO: 11155 - protein, 5 aa, Homo sapiens
LYSMI

SEQ ID NO: 11156 - protein, 5 aa, Homo sapiens
LYSMN

SEQ ID NO: 11157 - protein, 11 aa, Homo sapiens
LYSYGYSDLGY

SEQ ID NO: 11158 - protein, 5 aa, Homo sapiens
LYYIS

SEQ ID NO: 11159 - protein, 15 aa, Homo sapiens
LYYYEKRDCYRHFDN

SEQ ID NO: 11160 - protein, 14 aa, Homo sapiens
MARAIFLTEGGLDI

SEQ ID NO: 11161 - protein, 7 aa, Homo sapiens
MASNRDS

SEQ ID NO: 11162 - protein, 15 aa, Homo sapiens
MDDFESGTYYRFFGP

SEQ ID NO: 11163 - protein, 10 aa, Homo sapiens
MDNWKMSGAY

SEQ ID NO: 11164 - protein, 16 aa, Homo sapiens
MGGSGSYYQVPRLFDY

SEQ ID NO: 11165 - protein, 13 aa, Homo sapiens
MGRLPTTNRWFDP

SEQ ID NO: 11166 - protein, 7 aa, Homo sapiens
MGSNRAS

SEQ ID NO: 11167 - protein, 12 aa, Homo sapiens
MGYYDGTQRFDK

SEQ ID NO: 11168 - protein, 12 aa, Homo sapiens
MGYYNGTQRFDK

SEQ ID NO: 11169 - protein, 5 aa, Homo sapiens
MHAIS

SEQ ID NO: 11170 - protein, 11 aa, Homo sapiens
MHSIQFPPTWT

SEQ ID NO: 11171 - protein, 17 aa, Homo sapiens
MIHPSDSDTRYSPSFQG

SEQ ID NO: 11172 - protein, 17 aa, Homo sapiens
MINPAGGSANYAQKFQG

SEQ ID NO: 11173 - protein, 17 aa, Homo sapiens
MINPRDYTTNYAQKFQG

SEQ ID NO: 11174 - protein, 9 aa, Homo sapiens
MIWHDNAWV

SEQ ID NO: 11175 - protein, 9 aa, Homo sapiens
MIWHNSAYV

SEQ ID NO: 11176 - protein, 9 aa, Homo sapiens
MIWHRNAWV

SEQ ID NO: 11177 - protein, 9 aa, Homo sapiens
MIWHSDAWV

SEQ ID NO: 11178 - protein, 9 aa, Homo sapiens
MIWHSDAYV

SEQ ID NO: 11179 - protein, 9 aa, Homo sapiens
MIWHSGAWV

SEQ ID NO: 11180 - protein, 9 aa, Homo sapiens
MIWHSGAYV

SEQ ID NO: 11181 - protein, 9 aa, Homo sapiens
MIWHSNAWV

SEQ ID NO: 11182 - protein, 9 aa, Homo sapiens
MIWHSNAYV

SEQ ID NO: 11183 - protein, 9 aa, Homo sapiens
MIWHSNTWV

SEQ ID NO: 11184 - protein, 9 aa, Homo sapiens
MIWHSNTYV

SEQ ID NO: 11185 - protein, 9 aa, Homo sapiens
MIWHSSAWV

SEQ ID NO: 11186 - protein, 9 aa, Homo sapiens
MIWHSSAYV

SEQ ID NO: 11187 - protein, 9 aa, Homo sapiens
MIWHSSGGV

SEQ ID NO: 11188 - protein, 9 aa, Homo sapiens
MIWYGSAYV

SEQ ID NO: 11189 - protein, 17 aa, Homo sapiens
MIYPGDSDARYNPSFEG

SEQ ID NO: 11190 - protein, 7 aa, Homo sapiens
MLSNRDS

SEQ ID NO: 11191 - protein, 13 aa, Homo sapiens
MNGYHFLTNWFDP

SEQ ID NO: 11192 - protein, 9 aa, Homo sapiens
MQALETPIT

SEQ ID NO: 11193 - protein, 10 aa, Homo sapiens
MQALHTPIYS

SEQ ID NO: 11194 - protein, 9 aa, Homo sapiens
MQALKIPRT

SEQ ID NO: 11195 - protein, 9 aa, Homo sapiens
MQALQIPRT

SEQ ID NO: 11196 - protein, 9 aa, Homo sapiens
MQALQNTLT

SEQ ID NO: 11197 - protein, 9 aa, Homo sapiens
MQALQPPRT

SEQ ID NO: 11198 - protein, 9 aa, Homo sapiens
MQALQSALT

SEQ ID NO: 11199 - protein, 9 aa, Homo sapiens
MQALQSPLT

SEQ ID NO: 11200 - protein, 9 aa, Homo sapiens
MQALQTLYT

SEQ ID NO: 11201 - protein, 10 aa, Homo sapiens
MQALQTPEYT

SEQ ID NO: 11202 - protein, 9 aa, Homo sapiens
MQALQTPFT

SEQ ID NO: 11203 - protein, 9 aa, Homo sapiens
MQALQTPGT

SEQ ID NO: 11204 - protein, 9 aa, Homo sapiens
MQALQTPHT

SEQ ID NO: 11205 - protein, 9 aa, Homo sapiens
MQALQTPLS

SEQ ID NO: 11206 - protein, 9 aa, Homo sapiens
MQALQTPPT

SEQ ID NO: 11207 - protein, 10 aa, Homo sapiens
MQALQTPPYT

SEQ ID NO: 11208 - protein, 9 aa, Homo sapiens
MQALQTPRG

SEQ ID NO: 11209 - protein, 9 aa, Homo sapiens
MQALQTPRT

SEQ ID NO: 11210 - protein, 8 aa, Homo sapiens
MQALQTPT

SEQ ID NO: 11211 - protein, 9 aa, Homo sapiens
MQALQTPVT

SEQ ID NO: 11212 - protein, 9 aa, Homo sapiens
MQALQTPWT

SEQ ID NO: 11213 - protein, 8 aa, Homo sapiens
MQALQTRT

SEQ ID NO: 11214 - protein, 9 aa, Homo sapiens
MQALQTSLT

SEQ ID NO: 11215 - protein, 9 aa, Homo sapiens
MQALQTVHT

SEQ ID NO: 11216 - protein, 8 aa, Homo sapiens
MQALQTYT

SEQ ID NO: 11217 - protein, 9 aa, Homo sapiens
MQATHFPYT

SEQ ID NO: 11218 - protein, 9 aa, Homo sapiens
MQATHSPPT

SEQ ID NO: 11219 - protein, 9 aa, Homo sapiens
MQATHWPLT

SEQ ID NO: 11220 - protein, 10 aa, Homo sapiens
MQATHWPPYT

SEQ ID NO: 11221 - protein, 9 aa, Homo sapiens
MQATHWPWT

SEQ ID NO: 11222 - protein, 9 aa, Homo sapiens
MQATQFPGT

SEQ ID NO: 11223 - protein, 9 aa, Homo sapiens
MQATQFPIT

SEQ ID NO: 11224 - protein, 9 aa, Homo sapiens
MQATQFPRT

SEQ ID NO: 11225 - protein, 8 aa, Homo sapiens
MQATQFPT

SEQ ID NO: 11226 - protein, 9 aa, Homo sapiens
MQATQFPWT

SEQ ID NO: 11227 - protein, 9 aa, Homo sapiens
MQATQFPYT

SEQ ID NO: 11228 - protein, 9 aa, Homo sapiens
MQATQLPHT

SEQ ID NO: 11229 - protein, 9 aa, Homo sapiens
MQATRFPWT

SEQ ID NO: 11230 - protein, 9 aa, Homo sapiens
MQCTHWPRT

SEQ ID NO: 11231 - protein, 9 aa, Homo sapiens
MQDTHCLPH

SEQ ID NO: 11232 - protein, 9 aa, Homo sapiens
MQGIGVPKT

SEQ ID NO: 11233 - protein, 8 aa, Homo sapiens
MQGIHLIT

SEQ ID NO: 11234 - protein, 9 aa, Homo sapiens
MQGIHLPFT

SEQ ID NO: 11235 - protein, 10 aa, Homo sapiens
MQGIHLPPIT

SEQ ID NO: 11236 - protein, 10 aa, Homo sapiens
MQGIHLPPVT

SEQ ID NO: 11237 - protein, 9 aa, Homo sapiens
MQGIHLPRT

SEQ ID NO: 11238 - protein, 8 aa, Homo sapiens
MQGIHLYS

SEQ ID NO: 11239 - protein, 10 aa, Homo sapiens
MQGIQLPPIT

SEQ ID NO: 11240 - protein, 9 aa, Homo sapiens
MQGIQLPRT

SEQ ID NO: 11241 - protein, 10 aa, Homo sapiens
MQGKHFRLYT

SEQ ID NO: 11242 - protein, 10 aa, Homo sapiens
MQGKHWKEFT

SEQ ID NO: 11243 - protein, 10 aa, Homo sapiens
MQGKHWSEFT

SEQ ID NO: 11244 - protein, 10 aa, Homo sapiens
MQGKRWREFT

SEQ ID NO: 11245 - protein, 9 aa, Homo sapiens
MQGKSWPGS

SEQ ID NO: 11246 - protein, 10 aa, Homo sapiens
MQGLDLPPFT

SEQ ID NO: 11247 - protein, 9 aa, Homo sapiens
MQGLHLPFT

SEQ ID NO: 11248 - protein, 8 aa, Homo sapiens
MQGLHLYS

SEQ ID NO: 11249 - protein, 8 aa, Homo sapiens
MQGLHLYT

SEQ ID NO: 11250 - protein, 9 aa, Homo sapiens
MQGLHPPFT

SEQ ID NO: 11251 - protein, 10 aa, Homo sapiens
MQGLHTPPFT

SEQ ID NO: 11252 - protein, 8 aa, Homo sapiens
MQGLQNLT

SEQ ID NO: 11253 - protein, 9 aa, Homo sapiens
MQGLQTPNT

SEQ ID NO: 11254 - protein, 9 aa, Homo sapiens
MQGLQTPVT

SEQ ID NO: 11255 - protein, 10 aa, Homo sapiens
MQGMHPPPYT

SEQ ID NO: 11256 - protein, 9 aa, Homo sapiens
MQGQQTPPT

SEQ ID NO: 11257 - protein, 9 aa, Homo sapiens
MQGRHWPLT

SEQ ID NO: 11258 - protein, 9 aa, Homo sapiens
MQGRHWPYT

SEQ ID NO: 11259 - protein, 9 aa, Homo sapiens
MQGSFWPPT

SEQ ID NO: 11260 - protein, 10 aa, Homo sapiens
MQGSHWNVYT

SEQ ID NO: 11261 - protein, 9 aa, Homo sapiens
MQGSHWPFT

SEQ ID NO: 11262 - protein, 9 aa, Homo sapiens
MQGTHFPFT

SEQ ID NO: 11263 - protein, 8 aa, Homo sapiens
MQGTHGGT

SEQ ID NO: 11264 - protein, 8 aa, Homo sapiens
MQGTHLYS

SEQ ID NO: 11265 - protein, 9 aa, Homo sapiens
MQGTHTPHT

SEQ ID NO: 11266 - protein, 10 aa, Homo sapiens
MQGTHWHTYT

SEQ ID NO: 11267 - protein, 10 aa, Homo sapiens
MQGTHWHVYS

SEQ ID NO: 11268 - protein, 10 aa, Homo sapiens
MQGTHWNIYT

SEQ ID NO: 11269 - protein, 10 aa, Homo sapiens
MQGTHWNMYS

SEQ ID NO: 11270 - protein, 10 aa, Homo sapiens
MQGTHWNMYS

SEQ ID NO: 11271 - protein, 9 aa, Homo sapiens
MQGTHWPFT

SEQ ID NO: 11272 - protein, 9 aa, Homo sapiens
MQGTHWPLT

SEQ ID NO: 11273 - protein, 11 aa, Homo sapiens
MQGTHWPPGFT

SEQ ID NO: 11274 - protein, 10 aa, Homo sapiens
MQGTHWPPYI

SEQ ID NO: 11275 - protein, 10 aa, Homo sapiens
MQGTHWPPYT

SEQ ID NO: 11276 - protein, 10 aa, Homo sapiens
MQGTHWPRLT

SEQ ID NO: 11277 - protein, 10 aa, Homo sapiens
MQGTHWPSYT

SEQ ID NO: 11278 - protein, 9 aa, Homo sapiens
MQGTHWPWT

SEQ ID NO: 11279 - protein, 9 aa, Homo sapiens
MQGTHWPYT

SEQ ID NO: 11280 - protein, 9 aa, Homo sapiens
MQGTHWRVT

SEQ ID NO: 11281 - protein, 10 aa, Homo sapiens
MQGTHYHTYT

SEQ ID NO: 11282 - protein, 9 aa, Homo sapiens
MQGTKWPYT

SEQ ID NO: 11283 - protein, 9 aa, Homo sapiens
MQGTLWPYT

SEQ ID NO: 11284 - protein, 9 aa, Homo sapiens
MQGTNWPYS

SEQ ID NO: 11285 - protein, 9 aa, Homo sapiens
MQGTNWPYT

SEQ ID NO: 11286 - protein, 9 aa, Homo sapiens
MQGTQFPFT

SEQ ID NO: 11287 - protein, 9 aa, Homo sapiens
MQGTQWPYT

SEQ ID NO: 11288 - protein, 9 aa, Homo sapiens
MQGTRWPGS

SEQ ID NO: 11289 - protein, 9 aa, Homo sapiens
MQGTYMGST

SEQ ID NO: 11290 - protein, 9 aa, Homo sapiens
MQGTYWPFT

SEQ ID NO: 11291 - protein, 9 aa, Homo sapiens
MQGTYWPHT

SEQ ID NO: 11292 - protein, 9 aa, Homo sapiens
MQGTYWPLT

SEQ ID NO: 11293 - protein, 9 aa, Homo sapiens
MQGTYWPPA

SEQ ID NO: 11294 - protein, 10 aa, Homo sapiens
MQGTYWPPFT

SEQ ID NO: 11295 - protein, 9 aa, Homo sapiens
MQGTYWPYT

SEQ ID NO: 11296 - protein, 10 aa, Homo sapiens
MQGVDISPIT

SEQ ID NO: 11297 - protein, 10 aa, Homo sapiens
MQGVDLPPFT

SEQ ID NO: 11298 - protein, 10 aa, Homo sapiens
MQGVDVTPIT

SEQ ID NO: 11299 - protein, 9 aa, Homo sapiens
MQGVHLPIT

SEQ ID NO: 11300 - protein, 10 aa, Homo sapiens
MQGVHLPPVT

SEQ ID NO: 11301 - protein, 10 aa, Homo sapiens
MQGVHLPPYT

SEQ ID NO: 11302 - protein, 10 aa, Homo sapiens
MQGVHLPSIT

SEQ ID NO: 11303 - protein, 9 aa, Homo sapiens
MQGVQLPKT

SEQ ID NO: 11304 - protein, 10 aa, Homo sapiens
MQIKHWHIFS

SEQ ID NO: 11305 - protein, 10 aa, Homo sapiens
MQIKHWRLFT

SEQ ID NO: 11306 - protein, 10 aa, Homo sapiens
MQIKHWRSFS

SEQ ID NO: 11307 - protein, 9 aa, Homo sapiens
MQNFQLPVT

SEQ ID NO: 11308 - protein, 9 aa, Homo sapiens
MQQIHWPFT

SEQ ID NO: 11309 - protein, 9 aa, Homo sapiens
MQSIHFPLT

SEQ ID NO: 11310 - protein, 9 aa, Homo sapiens
MQSIHLPIT

SEQ ID NO: 11311 - protein, 9 aa, Homo sapiens
MQSIHLPLT

SEQ ID NO: 11312 - protein, 9 aa, Homo sapiens
MQSILLPPT

SEQ ID NO: 11313 - protein, 8 aa, Homo sapiens
MQSILPLT

SEQ ID NO: 11314 - protein, 9 aa, Homo sapiens
MQSIQLPGT

SEQ ID NO: 11315 - protein, 9 aa, Homo sapiens
MQSIQLPIT

SEQ ID NO: 11316 - protein, 9 aa, Homo sapiens
MQSIQLPLT

SEQ ID NO: 11317 - protein, 9 aa, Homo sapiens
MQSIQLPPA

SEQ ID NO: 11318 - protein, 10 aa, Homo sapiens
MQSIQLPRIT

SEQ ID NO: 11319 - protein, 9 aa, Homo sapiens
MQSIQLPRT

SEQ ID NO: 11320 - protein, 9 aa, Homo sapiens
MQSIQLPWT

SEQ ID NO: 11321 - protein, 9 aa, Homo sapiens
MQSIQLPYT

SEQ ID NO: 11322 - protein, 8 aa, Homo sapiens
MQSIQLRT

SEQ ID NO: 11323 - protein, 9 aa, Homo sapiens
MQSIQRPYT

SEQ ID NO: 11324 - protein, 9 aa, Homo sapiens
MQSIQVPGA

SEQ ID NO: 11325 - protein, 9 aa, Homo sapiens
MQSKQLPPT

SEQ ID NO: 11326 - protein, 9 aa, Homo sapiens
MQSLQLPYT

SEQ ID NO: 11327 - protein, 9 aa, Homo sapiens
MQSLQTPFT

SEQ ID NO: 11328 - protein, 9 aa, Homo sapiens
MQSLQTQLT

SEQ ID NO: 11329 - protein, 9 aa, Homo sapiens
MQSLRLPLT

SEQ ID NO: 11330 - protein, 9 aa, Homo sapiens
MQSTDWPYT

SEQ ID NO: 11331 - protein, 9 aa, Homo sapiens
MQSTELPYT

SEQ ID NO: 11332 - protein, 9 aa, Homo sapiens
MQSTQLPIT

SEQ ID NO: 11333 - protein, 9 aa, Homo sapiens
MQSTQLPLT

SEQ ID NO: 11334 - protein, 9 aa, Homo sapiens
MQSTQLPYT

SEQ ID NO: 11335 - protein, 9 aa, Homo sapiens
MQSVQIPCT

SEQ ID NO: 11336 - protein, 9 aa, Homo sapiens
MQSVQIPWT

SEQ ID NO: 11337 - protein, 9 aa, Homo sapiens
MQSVQLPCT

SEQ ID NO: 11338 - protein, 9 aa, Homo sapiens
MQSVQLPLT

SEQ ID NO: 11339 - protein, 9 aa, Homo sapiens
MQSVQLPWT

SEQ ID NO: 11340 - protein, 9 aa, Homo sapiens
MQSVQVPPT

SEQ ID NO: 11341 - protein, 9 aa, Homo sapiens
MQTIQFPFT

SEQ ID NO: 11342 - protein, 8 aa, Homo sapiens
MQTLQKRT

SEQ ID NO: 11343 - protein, 8 aa, Homo sapiens
MQTLQLYT

SEQ ID NO: 11344 - protein, 9 aa, Homo sapiens
MQTLQTPFT

SEQ ID NO: 11345 - protein, 9 aa, Homo sapiens
MQTLQTPLT

SEQ ID NO: 11346 - protein, 9 aa, Homo sapiens
MQTLQTVLT

SEQ ID NO: 11347 - protein, 9 aa, Homo sapiens
MQTTQFPHT

SEQ ID NO: 11348 - protein, 9 aa, Homo sapiens
MQVKEFPLT

SEQ ID NO: 11349 - protein, 9 aa, Homo sapiens
MQVLQFPYT

SEQ ID NO: 11350 - protein, 9 aa, Homo sapiens
MQVTHWPLT

SEQ ID NO: 11351 - protein, 11 aa, Homo sapiens
MRENSGWFNDF

SEQ ID NO: 11352 - protein, 5 aa, Homo sapiens
MSGMH

SEQ ID NO: 11353 - protein, 18 aa, Homo sapiens
MSVLDYDKTPDRYRFLDY

SEQ ID NO: 11354 - protein, 18 aa, Homo sapiens
MSVLDYDKTPGRYRFLDY

SEQ ID NO: 11355 - protein, 16 aa, Homo sapiens
MTTAFGGVTRLDAFDV

SEQ ID NO: 11356 - protein, 9 aa, Homo sapiens
MVWHNNAWV

SEQ ID NO: 11357 - protein, 9 aa, Homo sapiens
MVWHNSAWV

SEQ ID NO: 11358 - protein, 9 aa, Homo sapiens
MVWHNSAYV

SEQ ID NO: 11359 - protein, 9 aa, Homo sapiens
MVWHSSAWV

SEQ ID NO: 11360 - protein, 9 aa, Homo sapiens
MVWHSSAYV

SEQ ID NO: 11361 - protein, 5 aa, Homo sapiens
MYAIS

SEQ ID NO: 11362 - protein, 5 aa, Homo sapiens
MYGLH

SEQ ID NO: 11363 - protein, 5 aa, Homo sapiens
MYNMH

SEQ ID NO: 11364 - protein, 5 aa, Homo sapiens
MYTMH

SEQ ID NO: 11365 - protein, 5 aa, Homo sapiens
MYWMS

SEQ ID NO: 11366 - protein, 5 aa, Homo sapiens
NALIH

SEQ ID NO: 11367 - protein, 7 aa, Homo sapiens
NARMGVS

SEQ ID NO: 11368 - protein, 7 aa, Homo sapiens
NASTRAT

SEQ ID NO: 11369 - protein, 5 aa, Homo sapiens
NAWMN

SEQ ID NO: 11370 - protein, 5 aa, Homo sapiens
NAWMS

SEQ ID NO: 11371 - protein, 5 aa, Homo sapiens
NAWMT

SEQ ID NO: 11372 - protein, 13 aa, Homo sapiens
NAYYGSGSYNFDY

SEQ ID NO: 11373 - protein, 5 aa, Homo sapiens
NCAVS

SEQ ID NO: 11374 - protein, 5 aa, Homo sapiens
NCCMG

SEQ ID NO: 11375 - protein, 14 aa, Homo sapiens
NDDYVWGSYRSLDY

SEQ ID NO: 11376 - protein, 11 aa, Homo sapiens
NDGYKPQYLQH

SEQ ID NO: 11377 - protein, 7 aa, Homo sapiens
NDIYYWS

SEQ ID NO: 11378 - protein, 7 aa, Homo sapiens
NDNMLAP

SEQ ID NO: 11379 - protein, 19 aa, Homo sapiens
NDPDTYYYDDSGANYGMDV

SEQ ID NO: 11380 - protein, 19 aa, Homo sapiens
NDPNTYYYDDSGANYGMDV

SEQ ID NO: 11381 - protein, 5 aa, Homo sapiens
NDWIG

SEQ ID NO: 11382 - protein, 5 aa, Homo sapiens
NDYIH

SEQ ID NO: 11383 - protein, 5 aa, Homo sapiens
NDYWS

SEQ ID NO: 11384 - protein, 5 aa, Homo sapiens
NFAFT

SEQ ID NO: 11385 - protein, 5 aa, Homo sapiens
NFAIN

SEQ ID NO: 11386 - protein, 5 aa, Homo sapiens
NFAIS

SEQ ID NO: 11387 - protein, 5 aa, Homo sapiens
NFAMN

SEQ ID NO: 11388 - protein, 5 aa, Homo sapiens
NFAMT

SEQ ID NO: 11389 - protein, 5 aa, Homo sapiens
NFAMY

SEQ ID NO: 11390 - protein, 6 aa, Homo sapiens
NFAWDY

SEQ ID NO: 11391 - protein, 5 aa, Homo sapiens
NFGIS

SEQ ID NO: 11392 - protein, 5 aa, Homo sapiens
NFGMH

SEQ ID NO: 11393 - protein, 5 aa, Homo sapiens
NFGMN

SEQ ID NO: 11394 - protein, 97 aa, Homo sapiens
NFLLTQPHSVSESPGKTVTISCTGSGGAIARNYVQWYQVRPGSAPTTVIYEDNQRPSGVPDRFSGSVDSASNSASLIISGLQTEDEAEYYCQSYDTS

SEQ ID NO: 11395 - protein, 110 aa, Homo sapiens
NFLLTQPHSVSESPGKTVTISCTGSGGAIARNYVQWYQVRPGSAPTTVIYEDNQRPSGVPDRFSGSVDSASNSASLIISGLQTEDEAEYYCQSYDTSARVFGGGTKLIVL

SEQ ID NO: 11396 - protein, 97 aa, Homo sapiens
NFMLTQPHSVSESPGKTVTISCTGSSGNIADHYVQWYQLRPGSVPTIVIYEDNQRPSGVPDRFSGSIDISSNSASLTISGLKTEDEADYYCQSSGNS

SEQ ID NO: 11397 - protein, 111 aa, Homo sapiens
NFMLTQPHSVSESPGKTVTISCTGSSGNIADHYVQWYQLRPGSVPTIVIYEDNQRPSGVPDRFSGSIDISSNSASLTISGLKTEDEADYYCQSSGNSINWVFGGGTKLTVL

SEQ ID NO: 11398 - protein, 98 aa, Homo sapiens
NFMLTQPHSVSESPGKTVTISCTRSSGSIASNYVQWYQQRPGSAPTTVIYEDNQRPSGVPDRFSGSIDSSSNSASLTISGLKTEDEADYYCQSYDSSN

SEQ ID NO: 11399 - protein, 111 aa, Homo sapiens
NFMLTQPHSVSESPGKTVTISCTRSSGSIASNYVQWYQQRPGSAPTTVIYEDNQRPSGVPDRFSGSIDSSSNSASLTISGLKTEDEADYYCQSYDSSNRGVFGGGTKLTVL

SEQ ID NO: 11400 - protein, 98 aa, Homo sapiens
NFMLTQPHSVSESPGKTVTISCTRSSGSIASNYVQWYQQRPGSSPTTVIYEDNQRPSGVPDRFSGSIDSSSNSASLTISGLKTEDEADYYCQSYDSSN

SEQ ID NO: 11401 - protein, 110 aa, Homo sapiens
NFMLTQPHSVSESPGKTVTISCTRSSGSIASNYVQWYQQRPGSSPTTVIYEDNQRPSGVPDRFSGSIDSSSNSASLTISGLKTEDEADYYCQSYDSSNQVFGGGTKLTVL

SEQ ID NO: 11402 - protein, 111 aa, Homo sapiens
NFMLTQPHSVSESPGKTVTISCTRSSGSIASNYVQWYQQRPGSSPTTVIYEDNQRPSGVPDRFSGSIDSSSNSASLTISGLKTEDEADYYCQSYDSSNQVVFGGGTKLTVL

SEQ ID NO: 11403 - protein, 7 aa, Homo sapiens
NFNERPS

SEQ ID NO: 11404 - protein, 5 aa, Homo sapiens
NFPIG

SEQ ID NO: 11405 - protein, 5 aa, Homo sapiens
NFVMS

SEQ ID NO: 11406 - protein, 5 aa, Homo sapiens
NFWIG

SEQ ID NO: 11407 - protein, 5 aa, Homo sapiens
NFWIN

SEQ ID NO: 11408 - protein, 5 aa, Homo sapiens
NFWMH

SEQ ID NO: 11409 - protein, 5 aa, Homo sapiens
NFWMN

SEQ ID NO: 11410 - protein, 5 aa, Homo sapiens
NFWMS

SEQ ID NO: 11411 - protein, 5 aa, Homo sapiens
NFWMT

SEQ ID NO: 11412 - protein, 5 aa, Homo sapiens
NFYIH

SEQ ID NO: 11413 - protein, 5 aa, Homo sapiens
NFYWA

SEQ ID NO: 11414 - protein, 5 aa, Homo sapiens
NFYWS

SEQ ID NO: 11415 - protein, 11 aa, Homo sapiens
NGDYLGWGVDQ

SEQ ID NO: 11416 - protein, 6 aa, Homo sapiens
NGFYWG

SEQ ID NO: 11417 - protein, 6 aa, Homo sapiens
NGYKWG

SEQ ID NO: 11418 - protein, 6 aa, Homo sapiens
NHAFDI

SEQ ID NO: 11419 - protein, 5 aa, Homo sapiens
NHAIN

SEQ ID NO: 11420 - protein, 5 aa, Homo sapiens
NHAIS

SEQ ID NO: 11421 - protein, 5 aa, Homo sapiens
NHAMH

SEQ ID NO: 11422 - protein, 5 aa, Homo sapiens
NHGMH

SEQ ID NO: 11423 - protein, 5 aa, Homo sapiens
NHWLS

SEQ ID NO: 11424 - protein, 5 aa, Homo sapiens
NHWMS

SEQ ID NO: 11425 - protein, 5 aa, Homo sapiens
NHYWS

SEQ ID NO: 11426 - protein, 17 aa, Homo sapiens
NIDEGGNDKYYEDSVKG

SEQ ID NO: 11427 - protein, 16 aa, Homo sapiens
NIDHSGNTYHNPSLKS

SEQ ID NO: 11428 - protein, 17 aa, Homo sapiens
NIDKEGSERHYVDSVKG

SEQ ID NO: 11429 - protein, 17 aa, Homo sapiens
NIDQDGSEKNYVESLKG

SEQ ID NO: 11430 - protein, 17 aa, Homo sapiens
NIFRRGGNTFYNPSLKS

SEQ ID NO: 11431 - protein, 16 aa, Homo sapiens
NIFRSGTTYYNPSLQS

SEQ ID NO: 11432 - protein, 16 aa, Homo sapiens
NIFYSANTNYNPSLKS

SEQ ID NO: 11433 - protein, 16 aa, Homo sapiens
NIFYTGSAYYNPSLKS

SEQ ID NO: 11434 - protein, 17 aa, Homo sapiens
NIKADGTEKFYADSVKG

SEQ ID NO: 11435 - protein, 17 aa, Homo sapiens
NIKDDGSEKFYVDSVKG

SEQ ID NO: 11436 - protein, 17 aa, Homo sapiens
NIKDDGSEKYYADSVKG

SEQ ID NO: 11437 - protein, 17 aa, Homo sapiens
NIKEDESEKYYVDSVRG

SEQ ID NO: 11438 - protein, 17 aa, Homo sapiens
NIKEDGGKIVYVDSVKG

SEQ ID NO: 11439 - protein, 17 aa, Homo sapiens
NIKEDGREKWYVDSVEG

SEQ ID NO: 11440 - protein, 17 aa, Homo sapiens
NIKEDGSAEYYVDSVKG

SEQ ID NO: 11441 - protein, 17 aa, Homo sapiens
NIKEDGSDEYYADSVKG

SEQ ID NO: 11442 - protein, 17 aa, Homo sapiens
NIKEDGSDKYYVDSVKG

SEQ ID NO: 11443 - protein, 17 aa, Homo sapiens
NIKEDGSDRDYVDSVKG

SEQ ID NO: 11444 - protein, 17 aa, Homo sapiens
NIKEDGSEENYVDSVKG

SEQ ID NO: 11445 - protein, 17 aa, Homo sapiens
NIKEDGSEEYYVDSVKG

SEQ ID NO: 11446 - protein, 17 aa, Homo sapiens
NIKEDGSEIYYVDSVKG

SEQ ID NO: 11447 - protein, 17 aa, Homo sapiens
NIKEDGSEKHYVDSVKG

SEQ ID NO: 11448 - protein, 17 aa, Homo sapiens
NIKEDGSEKNYVDSVKG

SEQ ID NO: 11449 - protein, 17 aa, Homo sapiens
NIKEDGSEKYYVDSVKG

SEQ ID NO: 11450 - protein, 17 aa, Homo sapiens
NIKEDGSENNYVDSVKG

SEQ ID NO: 11451 - protein, 17 aa, Homo sapiens
NIKEDGSERNYVDSVKG

SEQ ID NO: 11452 - protein, 17 aa, Homo sapiens
NIKEDGSETLYLDSVRG

SEQ ID NO: 11453 - protein, 17 aa, Homo sapiens
NIKEDGSETYYLDSVKG

SEQ ID NO: 11454 - protein, 17 aa, Homo sapiens
NIKEDGSEVHYVDSVKG

SEQ ID NO: 11455 - protein, 17 aa, Homo sapiens
NIKEDGSEVLYVDSVKG

SEQ ID NO: 11456 - protein, 17 aa, Homo sapiens
NIKEDGSKIYYLDSVKG

SEQ ID NO: 11457 - protein, 17 aa, Homo sapiens
NIKEDGSKSYYVDSVKG

SEQ ID NO: 11458 - protein, 17 aa, Homo sapiens
NIKEDGSQKDYVDSVKG

SEQ ID NO: 11459 - protein, 17 aa, Homo sapiens
NIKEDGSQKHYVDSVKG

SEQ ID NO: 11460 - protein, 17 aa, Homo sapiens
NIKEDGTEEYYVDSVKG

SEQ ID NO: 11461 - protein, 17 aa, Homo sapiens
NIKGDGSEIHYMDSVKG

SEQ ID NO: 11462 - protein, 17 aa, Homo sapiens
NIKGDGSEKYYVDSVKG

SEQ ID NO: 11463 - protein, 17 aa, Homo sapiens
NIKGDGSERYYVDSVKG

SEQ ID NO: 11464 - protein, 17 aa, Homo sapiens
NIKGDGSETHYVDSVKG

SEQ ID NO: 11465 - protein, 17 aa, Homo sapiens
NIKGDGSETQYVDSVKG

SEQ ID NO: 11466 - protein, 17 aa, Homo sapiens
NIKGDGSKKYYVDSVKG

SEQ ID NO: 11467 - protein, 17 aa, Homo sapiens
NIKGDGTEKNYVDSVKG

SEQ ID NO: 11468 - protein, 17 aa, Homo sapiens
NIKHDESEKFYVDSVKG

SEQ ID NO: 11469 - protein, 17 aa, Homo sapiens
NIKHDGTESFSVDSVKG

SEQ ID NO: 11470 - protein, 17 aa, Homo sapiens
NIKKDESEKHYVDSVTG

SEQ ID NO: 11471 - protein, 17 aa, Homo sapiens
NIKKDGTEEYYVDSVKG

SEQ ID NO: 11472 - protein, 17 aa, Homo sapiens
NIKNDGSKTYYVDSVKG

SEQ ID NO: 11473 - protein, 17 aa, Homo sapiens
NIKPDGSAKNYVDSVKG

SEQ ID NO: 11474 - protein, 17 aa, Homo sapiens
NIKPDGSDEYYVDSMKG

SEQ ID NO: 11475 - protein, 17 aa, Homo sapiens
NIKPDGSDKNYLGSVRG

SEQ ID NO: 11476 - protein, 17 aa, Homo sapiens
NIKPDGSEKHYVDSVKG

SEQ ID NO: 11477 - protein, 17 aa, Homo sapiens
NIKPDGSEKNYVDSVKG

SEQ ID NO: 11478 - protein, 17 aa, Homo sapiens
NIKPDGSEKYFIDSVKG

SEQ ID NO: 11479 - protein, 17 aa, Homo sapiens
NIKPDGSKKNYVDSVRG

SEQ ID NO: 11480 - protein, 17 aa, Homo sapiens
NIKQDGDAKFYVDSVKG

SEQ ID NO: 11481 - protein, 17 aa, Homo sapiens
NIKQDGGEKHYVDSVKG

SEQ ID NO: 11482 - protein, 17 aa, Homo sapiens
NIKQDGGETSYVASVKG

SEQ ID NO: 11483 - protein, 17 aa, Homo sapiens
NIKQDGSDKYFMDSVKG

SEQ ID NO: 11484 - protein, 17 aa, Homo sapiens
NIKQDGSEEKYVDSVKG

SEQ ID NO: 11485 - protein, 17 aa, Homo sapiens
NIKQDGSEKNYVDSVKG

SEQ ID NO: 11486 - protein, 17 aa, Homo sapiens
NIKQDGSEKVYVDSVKG

SEQ ID NO: 11487 - protein, 17 aa, Homo sapiens
NIKQDGSEKYFVDSVKG

SEQ ID NO: 11488 - protein, 17 aa, Homo sapiens
NIKQDGSEKYYVDSVKG

SEQ ID NO: 11489 - protein, 17 aa, Homo sapiens
NIKQDGSELKYVESVKG

SEQ ID NO: 11490 - protein, 17 aa, Homo sapiens
NIKQDGSELNYVDSVKG

SEQ ID NO: 11491 - protein, 17 aa, Homo sapiens
NIKQDGSENHYVDSVKG

SEQ ID NO: 11492 - protein, 17 aa, Homo sapiens
NIKQDGSETFYGDSVKG

SEQ ID NO: 11493 - protein, 17 aa, Homo sapiens
NIKQDGSETHYLDSVRG

SEQ ID NO: 11494 - protein, 17 aa, Homo sapiens
NIKQDKSEENYVDSVKG

SEQ ID NO: 11495 - protein, 17 aa, Homo sapiens
NIKYDGSEGSYLDSVKG

SEQ ID NO: 11496 - protein, 17 aa, Homo sapiens
NIKYDGSEKYYVGSVKG

SEQ ID NO: 11497 - protein, 17 aa, Homo sapiens
NINDDGSEKHYVDSVEG

SEQ ID NO: 11498 - protein, 17 aa, Homo sapiens
NINDDGSQKYHADPVEG

SEQ ID NO: 11499 - protein, 17 aa, Homo sapiens
NINEDGGDKFYVDSVKG

SEQ ID NO: 11500 - protein, 17 aa, Homo sapiens
NINEDGSDKYYVDSVKG

SEQ ID NO: 11501 - protein, 17 aa, Homo sapiens
NINEDGSETHCVDSVKG

SEQ ID NO: 11502 - protein, 17 aa, Homo sapiens
NINEDGSKKFYVDSVRG

SEQ ID NO: 11503 - protein, 17 aa, Homo sapiens
NINKDGSEKYYVDSVKG

SEQ ID NO: 11504 - protein, 17 aa, Homo sapiens
NINPDGSEEYYADSVKG

SEQ ID NO: 11505 - protein, 17 aa, Homo sapiens
NINPDGSKTNYVDSVKG

SEQ ID NO: 11506 - protein, 17 aa, Homo sapiens
NINQDGSGKEYVDSVKG

SEQ ID NO: 11507 - protein, 17 aa, Homo sapiens
NINQDGSRKNYLGSVRD

SEQ ID NO: 11508 - protein, 17 aa, Homo sapiens
NINQDVSHIYYLDSVRG

SEQ ID NO: 11509 - protein, 17 aa, Homo sapiens
NINRDGSETYYVDSVKG

SEQ ID NO: 11510 - protein, 17 aa, Homo sapiens
NINYNGGSTSYADSVKG

SEQ ID NO: 11511 - protein, 17 aa, Homo sapiens
NIQEDGTEKYYEDSVKG

SEQ ID NO: 11512 - protein, 17 aa, Homo sapiens
NIQREGYEKNYVDSVKG

SEQ ID NO: 11513 - protein, 17 aa, Homo sapiens
NIRADGNERNYVDSVKG

SEQ ID NO: 11514 - protein, 17 aa, Homo sapiens
NIREDGSEKYYLDSVKG

SEQ ID NO: 11515 - protein, 17 aa, Homo sapiens
NIRKDGSKMYYLDSVEG

SEQ ID NO: 11516 - protein, 17 aa, Homo sapiens
NIRQDGSEIYYADSVKG

SEQ ID NO: 11517 - protein, 15 aa, Homo sapiens
NIVGTTIVHYSYMDV

SEQ ID NO: 11518 - protein, 16 aa, Homo sapiens
NIYASGSSYYNPSLKS

SEQ ID NO: 11519 - protein, 17 aa, Homo sapiens
NIYCGDSESIYSPSFQG

SEQ ID NO: 11520 - protein, 16 aa, Homo sapiens
NIYHSGSAYYNPSLKS

SEQ ID NO: 11521 - protein, 17 aa, Homo sapiens
NIYPGDSATRYSPSFQG

SEQ ID NO: 11522 - protein, 17 aa, Homo sapiens
NIYPGDSDARYSPSFQG

SEQ ID NO: 11523 - protein, 17 aa, Homo sapiens
NIYPGDSDTIYSPSFEG

SEQ ID NO: 11524 - protein, 17 aa, Homo sapiens
NIYPGDSDTKYSPSFQG

SEQ ID NO: 11525 - protein, 17 aa, Homo sapiens
NIYPGDSDTKYSQSFQG

SEQ ID NO: 11526 - protein, 17 aa, Homo sapiens
NIYPRDSDTAYSPSFEG

SEQ ID NO: 11527 - protein, 16 aa, Homo sapiens
NIYYRGTTYYNPSLKS

SEQ ID NO: 11528 - protein, 16 aa, Homo sapiens
NIYYSASTYYNPSLKS

SEQ ID NO: 11529 - protein, 16 aa, Homo sapiens
NIYYSGETYYTPSLES

SEQ ID NO: 11530 - protein, 16 aa, Homo sapiens
NIYYSGHAYYNPSLES

SEQ ID NO: 11531 - protein, 16 aa, Homo sapiens
NIYYSGHTYYNPSLES

SEQ ID NO: 11532 - protein, 16 aa, Homo sapiens
NIYYSGSTDYNPSLKS

SEQ ID NO: 11533 - protein, 16 aa, Homo sapiens
NIYYSGSTNYNPFLKS

SEQ ID NO: 11534 - protein, 16 aa, Homo sapiens
NIYYSGSTYHNPSLKS

SEQ ID NO: 11535 - protein, 16 aa, Homo sapiens
NIYYSGTTYYTPSLKS

SEQ ID NO: 11536 - protein, 16 aa, Homo sapiens
NIYYSRNTFYNPSLKS

SEQ ID NO: 11537 - protein, 16 aa, Homo sapiens
NIYYTGTTDYNPSLRS

SEQ ID NO: 11538 - protein, 7 aa, Homo sapiens
NKNFLWG

SEQ ID NO: 11539 - protein, 7 aa, Homo sapiens
NKRYSWG

SEQ ID NO: 11540 - protein, 7 aa, Homo sapiens
NKSYYWN

SEQ ID NO: 11541 - protein, 13 aa, Homo sapiens
NLHNNDAWFLGDY

SEQ ID NO: 11542 - protein, 13 aa, Homo sapiens
NLHSDNTWYLGDF

SEQ ID NO: 11543 - protein, 17 aa, Homo sapiens
NLKPDGSDKYYVDSVKG

SEQ ID NO: 11544 - protein, 14 aa, Homo sapiens
NLLYESSTYRPLDY

SEQ ID NO: 11545 - protein, 17 aa, Homo sapiens
NLNQRGSEKYYVDSVRG

SEQ ID NO: 11546 - protein, 17 aa, Homo sapiens
NMKHDGSEKNYVDSVKG

SEQ ID NO: 11547 - protein, 17 aa, Homo sapiens
NMKHDGSEKYYLDSVKG

SEQ ID NO: 11548 - protein, 17 aa, Homo sapiens
NMKKDGSEIYYVDSVKG

SEQ ID NO: 11549 - protein, 17 aa, Homo sapiens
NMKQDGSEKYYVDSVKG

SEQ ID NO: 11550 - protein, 10 aa, Homo sapiens
NMQWIRAFDD

SEQ ID NO: 11551 - protein, 5 aa, Homo sapiens
NNAII

SEQ ID NO: 11552 - protein, 5 aa, Homo sapiens
NNAIS

SEQ ID NO: 11553 - protein, 5 aa, Homo sapiens
NNAVS

SEQ ID NO: 11554 - protein, 5 aa, Homo sapiens
NNDIN

SEQ ID NO: 11555 - protein, 7 aa, Homo sapiens
NNNQRPS

SEQ ID NO: 11556 - protein, 7 aa, Homo sapiens
NNSQRPS

SEQ ID NO: 11557 - protein, 5 aa, Homo sapiens
NNVMF

SEQ ID NO: 11558 - protein, 5 aa, Homo sapiens
NNWIG

SEQ ID NO: 11559 - protein, 5 aa, Homo sapiens
NNWVG

SEQ ID NO: 11560 - protein, 5 aa, Homo sapiens
NNYMN

SEQ ID NO: 11561 - protein, 5 aa, Homo sapiens
NNYMS

SEQ ID NO: 11562 - protein, 5 aa, Homo sapiens
NPWMS

SEQ ID NO: 11563 - protein, 11 aa, Homo sapiens
NQAGSGWPFDY

SEQ ID NO: 11564 - protein, 5 aa, Homo sapiens
NQWMS

SEQ ID NO: 11565 - protein, 15 aa, Homo sapiens
NQYDYFGSWTDWFDP

SEQ ID NO: 11566 - protein, 5 aa, Homo sapiens
NQYWS

SEQ ID NO: 11567 - protein, 21 aa, Homo sapiens
NRAMVRGTTDPYNYFYYGLDV

SEQ ID NO: 11568 - protein, 11 aa, Homo sapiens
NRGARVGGFDA

SEQ ID NO: 11569 - protein, 16 aa, Homo sapiens
NRGECNDDSCYRDFDY

SEQ ID NO: 11570 - protein, 16 aa, Homo sapiens
NRGECNDDSCYRDLDY

SEQ ID NO: 11571 - protein, 18 aa, Homo sapiens
NRGGVYDSGTYYIGDFDH

SEQ ID NO: 11572 - protein, 18 aa, Homo sapiens
NRGGVYDSGTYYIGDFDY

SEQ ID NO: 11573 - protein, 5 aa, Homo sapiens
NSAIS

SEQ ID NO: 11574 - protein, 5 aa, Homo sapiens
NSAVG

SEQ ID NO: 11575 - protein, 7 aa, Homo sapiens
NSDQRPS

SEQ ID NO: 11576 - protein, 11 aa, Homo sapiens
NSFTSSTTPVV

SEQ ID NO: 11577 - protein, 5 aa, Homo sapiens
NSGIS

SEQ ID NO: 11578 - protein, 5 aa, Homo sapiens
NSGMN

SEQ ID NO: 11579 - protein, 12 aa, Homo sapiens
NSGYTYTSSVDY

SEQ ID NO: 11580 - protein, 16 aa, Homo sapiens
NSHHDGTTSYNPSLKS

SEQ ID NO: 11581 - protein, 14 aa, Homo sapiens
NSHYTLTLGNWFDP

SEQ ID NO: 11582 - protein, 6 aa, Homo sapiens
NSNAIS

SEQ ID NO: 11583 - protein, 11 aa, Homo sapiens
NSRDNNGDYYV

SEQ ID NO: 11584 - protein, 13 aa, Homo sapiens
NSRDSSGNHLGNV

SEQ ID NO: 11585 - protein, 13 aa, Homo sapiens
NSRDSSGNHLGWV

SEQ ID NO: 11586 - protein, 11 aa, Homo sapiens
NSRDSSGNHLV

SEQ ID NO: 11587 - protein, 12 aa, Homo sapiens
NSRDSSGNHLVV

SEQ ID NO: 11588 - protein, 11 aa, Homo sapiens
NSRDSSGNHVV

SEQ ID NO: 11589 - protein, 12 aa, Homo sapiens
NSRDSSGNLHVV

SEQ ID NO: 11590 - protein, 10 aa, Homo sapiens
NSRDSSGNWV

SEQ ID NO: 11591 - protein, 11 aa, Homo sapiens
NSRDSSGQYRV

SEQ ID NO: 11592 - protein, 11 aa, Homo sapiens
NSRDSTGKVYV

SEQ ID NO: 11593 - protein, 10 aa, Homo sapiens
NSRDTSGNHP

SEQ ID NO: 11594 - protein, 11 aa, Homo sapiens
NSRHSSGNSWV

SEQ ID NO: 11595 - protein, 7 aa, Homo sapiens
NSRVGVS

SEQ ID NO: 11596 - protein, 16 aa, Homo sapiens
NSSQSLVYSDGDTYLN

SEQ ID NO: 11597 - protein, 5 aa, Homo sapiens
NSVMG

SEQ ID NO: 11598 - protein, 5 aa, Homo sapiens
NSWMN

SEQ ID NO: 11599 - protein, 5 aa, Homo sapiens
NSWMS

SEQ ID NO: 11600 - protein, 5 aa, Homo sapiens
NSYMS

SEQ ID NO: 11601 - protein, 10 aa, Homo sapiens
NSYRSDSTDV

SEQ ID NO: 11602 - protein, 10 aa, Homo sapiens
NSYTDSTTYV

SEQ ID NO: 11603 - protein, 9 aa, Homo sapiens
NSYTSRTSV

SEQ ID NO: 11604 - protein, 7 aa, Homo sapiens
NTGLGVT

SEQ ID NO: 11605 - protein, 7 aa, Homo sapiens
NTGYRPS

SEQ ID NO: 11606 - protein, 16 aa, Homo sapiens
NTHRGGTTNDNSSLKS

SEQ ID NO: 11607 - protein, 16 aa, Homo sapiens
NTHRSGSTNDNSSLKS

SEQ ID NO: 11608 - protein, 7 aa, Homo sapiens
NTSNKHS

SEQ ID NO: 11609 - protein, 5 aa, Homo sapiens
NTWMS

SEQ ID NO: 11610 - protein, 7 aa, Homo sapiens
NVNKWPS

SEQ ID NO: 11611 - protein, 7 aa, Homo sapiens
NVSNRDS

SEQ ID NO: 11612 - protein, 7 aa, Homo sapiens
NVSNRHS

SEQ ID NO: 11613 - protein, 7 aa, Homo sapiens
NVSSLET

SEQ ID NO: 11614 - protein, 5 aa, Homo sapiens
NVWMN

SEQ ID NO: 11615 - protein, 5 aa, Homo sapiens
NVWMS

SEQ ID NO: 11616 - protein, 16 aa, Homo sapiens
NVYTSGSSNYNPSLKN

SEQ ID NO: 11617 - protein, 8 aa, Homo sapiens
NWGRPVDY

SEQ ID NO: 11618 - protein, 5 aa, Homo sapiens
NYAFN

SEQ ID NO: 11619 - protein, 5 aa, Homo sapiens
NYAFS

SEQ ID NO: 11620 - protein, 5 aa, Homo sapiens
NYAHY

SEQ ID NO: 11621 - protein, 5 aa, Homo sapiens
NYAIH

SEQ ID NO: 11622 - protein, 5 aa, Homo sapiens
NYAIN

SEQ ID NO: 11623 - protein, 5 aa, Homo sapiens
NYAIS

SEQ ID NO: 11624 - protein, 5 aa, Homo sapiens
NYAIT

SEQ ID NO: 11625 - protein, 5 aa, Homo sapiens
NYAIY

SEQ ID NO: 11626 - protein, 5 aa, Homo sapiens
NYALH

SEQ ID NO: 11627 - protein, 5 aa, Homo sapiens
NYALS

SEQ ID NO: 11628 - protein, 5 aa, Homo sapiens
NYAMD

SEQ ID NO: 11629 - protein, 5 aa, Homo sapiens
NYAMG

SEQ ID NO: 11630 - protein, 5 aa, Homo sapiens
NYAMH

SEQ ID NO: 11631 - protein, 5 aa, Homo sapiens
NYAMN

SEQ ID NO: 11632 - protein, 5 aa, Homo sapiens
NYAMS

SEQ ID NO: 11633 - protein, 5 aa, Homo sapiens
NYAMT

SEQ ID NO: 11634 - protein, 5 aa, Homo sapiens
NYAMY

SEQ ID NO: 11635 - protein, 5 aa, Homo sapiens
NYAVI

SEQ ID NO: 11636 - protein, 5 aa, Homo sapiens
NYAVS

SEQ ID NO: 11637 - protein, 5 aa, Homo sapiens
NYDIN

SEQ ID NO: 11638 - protein, 5 aa, Homo sapiens
NYDMH

SEQ ID NO: 11639 - protein, 5 aa, Homo sapiens
NYDMN

SEQ ID NO: 11640 - protein, 5 aa, Homo sapiens
NYDMQ

SEQ ID NO: 11641 - protein, 5 aa, Homo sapiens
NYDWS

SEQ ID NO: 11642 - protein, 5 aa, Homo sapiens
NYEMN

SEQ ID NO: 11643 - protein, 5 aa, Homo sapiens
NYFMN

SEQ ID NO: 11644 - protein, 5 aa, Homo sapiens
NYFMT

SEQ ID NO: 11645 - protein, 5 aa, Homo sapiens
NYGIG

SEQ ID NO: 11646 - protein, 5 aa, Homo sapiens
NYGIH

SEQ ID NO: 11647 - protein, 5 aa, Homo sapiens
NYGIS

SEQ ID NO: 11648 - protein, 5 aa, Homo sapiens
NYGIT

SEQ ID NO: 11649 - protein, 5 aa, Homo sapiens
NYGLS

SEQ ID NO: 11650 - protein, 5 aa, Homo sapiens
NYGMH

SEQ ID NO: 11651 - protein, 5 aa, Homo sapiens
NYGMN

SEQ ID NO: 11652 - protein, 5 aa, Homo sapiens
NYGMS

SEQ ID NO: 11653 - protein, 5 aa, Homo sapiens
NYGVS

SEQ ID NO: 11654 - protein, 5 aa, Homo sapiens
NYGVT

SEQ ID NO: 11655 - protein, 5 aa, Homo sapiens
NYHWS

SEQ ID NO: 11656 - protein, 5 aa, Homo sapiens
NYIFS

SEQ ID NO: 11657 - protein, 5 aa, Homo sapiens
NYLIH

SEQ ID NO: 11658 - protein, 5 aa, Homo sapiens
NYLMT

SEQ ID NO: 11659 - protein, 5 aa, Homo sapiens
NYNLN

SEQ ID NO: 11660 - protein, 5 aa, Homo sapiens
NYNMY

SEQ ID NO: 11661 - protein, 11 aa, Homo sapiens
NYNYDSSAYSG

SEQ ID NO: 11662 - protein, 5 aa, Homo sapiens
NYPMG

SEQ ID NO: 11663 - protein, 5 aa, Homo sapiens
NYPMH

SEQ ID NO: 11664 - protein, 5 aa, Homo sapiens
NYTMN

SEQ ID NO: 11665 - protein, 5 aa, Homo sapiens
NYVIS

SEQ ID NO: 11666 - protein, 5 aa, Homo sapiens
NYVMH

SEQ ID NO: 11667 - protein, 5 aa, Homo sapiens
NYVMI

SEQ ID NO: 11668 - protein, 5 aa, Homo sapiens
NYVMS

SEQ ID NO: 11669 - protein, 5 aa, Homo sapiens
NYVMT

SEQ ID NO: 11670 - protein, 5 aa, Homo sapiens
NYVMY

SEQ ID NO: 11671 - protein, 5 aa, Homo sapiens
NYVVN

SEQ ID NO: 11672 - protein, 5 aa, Homo sapiens
NYWIA

SEQ ID NO: 11673 - protein, 5 aa, Homo sapiens
NYWIG

SEQ ID NO: 11674 - protein, 5 aa, Homo sapiens
NYWIH

SEQ ID NO: 11675 - protein, 5 aa, Homo sapiens
NYWIN

SEQ ID NO: 11676 - protein, 5 aa, Homo sapiens
NYWMG

SEQ ID NO: 11677 - protein, 5 aa, Homo sapiens
NYWMH

SEQ ID NO: 11678 - protein, 5 aa, Homo sapiens
NYWMS

SEQ ID NO: 11679 - protein, 5 aa, Homo sapiens
NYWMT

SEQ ID NO: 11680 - protein, 5 aa, Homo sapiens
NYYCN

SEQ ID NO: 11681 - protein, 12 aa, Homo sapiens
NYYDGSAFYFDY

SEQ ID NO: 11682 - protein, 13 aa, Homo sapiens
NYYDSSGYKIFDY

SEQ ID NO: 11683 - protein, 11 aa, Homo sapiens
NYYGSGSKHDS

SEQ ID NO: 11684 - protein, 5 aa, Homo sapiens
NYYIQ

SEQ ID NO: 11685 - protein, 5 aa, Homo sapiens
NYYMN

SEQ ID NO: 11686 - protein, 5 aa, Homo sapiens
NYYMT

SEQ ID NO: 11687 - protein, 5 aa, Homo sapiens
NYYWA

SEQ ID NO: 11688 - protein, 5 aa, Homo sapiens
NYYWG

SEQ ID NO: 11689 - protein, 5 aa, Homo sapiens
NYYWN

SEQ ID NO: 11690 - protein, 5 aa, Homo sapiens
NYYWS

SEQ ID NO: 11691 - protein, 5 aa, Homo sapiens
NYYWT

SEQ ID NO: 11692 - protein, 5 aa, Homo sapiens
NYYYS

SEQ ID NO: 11693 - protein, 16 aa, Homo sapiens
PANFYGNSGHYNYFDL

SEQ ID NO: 11694 - protein, 16 aa, Homo sapiens
PAPQYGSGTFYLSFDY

SEQ ID NO: 11695 - protein, 7 aa, Homo sapiens
PASSFQS

SEQ ID NO: 11696 - protein, 15 aa, Homo sapiens
PATPRPVVFDYYFDY

SEQ ID NO: 11697 - protein, 18 aa, Homo sapiens
PFGELLSDEEYYYYGMDV

SEQ ID NO: 11698 - protein, 16 aa, Homo sapiens
PGEDCFSGDCYSPFDY

SEQ ID NO: 11699 - protein, 10 aa, Homo sapiens
PGEWGGGFDY

SEQ ID NO: 11700 - protein, 15 aa, Homo sapiens
PGRGSMLTAYWYFDL

SEQ ID NO: 11701 - protein, 15 aa, Homo sapiens
PGSLRELSLYGRIAH

SEQ ID NO: 11702 - protein, 15 aa, Homo sapiens
PGSLRELSLYGRIAY

SEQ ID NO: 11703 - protein, 14 aa, Homo sapiens
PGTSSDVGGYNYVS

SEQ ID NO: 11704 - protein, 11 aa, Homo sapiens
PGVAVAYSFDV

SEQ ID NO: 11705 - protein, 13 aa, Homo sapiens
PGYTNAWTDAFHI

SEQ ID NO: 11706 - protein, 15 aa, Homo sapiens
PHCSGVSCSENWFDT

SEQ ID NO: 11707 - protein, 10 aa, Homo sapiens
PHDRDHAFDI

SEQ ID NO: 11708 - protein, 17 aa, Homo sapiens
PHHHDYGDYYVSGWFDP

SEQ ID NO: 11709 - protein, 14 aa, Homo sapiens
PLITSIVRGGGCPY

SEQ ID NO: 11710 - protein, 11 aa, Homo sapiens
PLNWGGDAFDI

SEQ ID NO: 11711 - protein, 11 aa, Homo sapiens
PLNWGGDAFEI

SEQ ID NO: 11712 - protein, 13 aa, Homo sapiens
PLRGSSRYDGFQI

SEQ ID NO: 11713 - protein, 20 aa, Homo sapiens
PLRTGTSSNTQRGLYDGFNL

SEQ ID NO: 11714 - protein, 10 aa, Homo sapiens
PLVDTAMIDY

SEQ ID NO: 11715 - protein, 19 aa, Homo sapiens
PMGWAVAGTHYYYYYGMDV

SEQ ID NO: 11716 - protein, 15 aa, Homo sapiens
PMKPEWLLRHSNFHY

SEQ ID NO: 11717 - protein, 19 aa, Homo sapiens
PPLRRLAYCGGDCYSYFDY

SEQ ID NO: 11718 - protein, 20 aa, Homo sapiens
PPPRMVGLQQSPYYYYGMGV

SEQ ID NO: 11719 - protein, 14 aa, Homo sapiens
PPTGVVSSWFYFDS

SEQ ID NO: 11720 - protein, 20 aa, Homo sapiens
PQAYLGYCSGVRCPQYYFDY

SEQ ID NO: 11721 - protein, 22 aa, Homo sapiens
PQETEGYCSGDNCYQDYYGMDV

SEQ ID NO: 11722 - protein, 8 aa, Homo sapiens
PREEGVDH

SEQ ID NO: 11723 - protein, 13 aa, Homo sapiens
PRGATNYYHYMDV

SEQ ID NO: 11724 - protein, 17 aa, Homo sapiens
PRGYYGSGLYYHSAFDI

SEQ ID NO: 11725 - protein, 17 aa, Homo sapiens
PRNTALPTRFHHFYMDV

SEQ ID NO: 11726 - protein, 14 aa, Homo sapiens
PRPSGIPVAGRLDY

SEQ ID NO: 11727 - protein, 14 aa, Homo sapiens
PRREDYGEYTSFDY

SEQ ID NO: 11728 - protein, 17 aa, Homo sapiens
PRYSSGWYQVLDDAFDI

SEQ ID NO: 11729 - protein, 15 aa, Homo sapiens
PSSGSYYNSRLCFHF

SEQ ID NO: 11730 - protein, 15 aa, Homo sapiens
PTDCGGDCQYDVFDI

SEQ ID NO: 11731 - protein, 15 aa, Homo sapiens
PTNCGGDCDYDAFDI

SEQ ID NO: 11732 - protein, 7 aa, Homo sapiens
PTSTLQS

SEQ ID NO: 11733 - protein, 14 aa, Homo sapiens
PVATPVYLSGLFDY

SEQ ID NO: 11734 - protein, 13 aa, Homo sapiens
PVFKGKWDFFFDS

SEQ ID NO: 11735 - protein, 13 aa, Homo sapiens
PVFRGKWDSFFDN

SEQ ID NO: 11736 - protein, 16 aa, Homo sapiens
PYFDFRSGYTSGAFDI

SEQ ID NO: 11737 - protein, 10 aa, Homo sapiens
PYYDYRPQLY

SEQ ID NO: 11738 - protein, 103 aa, Homo sapiens
QAALTQPSSLSASPGASASLTCTLRSGIDVGTYSIYWYQQKAGSPPQYLLTYKSDSDKQQGSGVPSRFSGSKDASANAGVLLISGLQSEDEADYYCMIWHSGA

SEQ ID NO: 11739 - protein, 115 aa, Homo sapiens
QAALTQPSSLSASPGASASLTCTLRSGIDVGTYSIYWYQQKAGSPPQYLLTYKSDSDKQQGSGVPSRFSGSKDASANAGVLLISGLQSEDEADYYCMIWHSGAWVLGGGTRLTVL

SEQ ID NO: 11740 - protein, 10 aa, Homo sapiens
QAGDNSGPVI

SEQ ID NO: 11741 - protein, 93 aa, Homo sapiens
QAGLTQPPSVSKDLGQTATLTCTGDSNNVDKEGAVWLQQHQGHPPKLLSFRDNNRPSGVSERFSASRSRNTASLTITGLQPEDEADYYCTSWD

SEQ ID NO: 11742 - protein, 110 aa, Homo sapiens
QAGLTQPPSVSKDLGQTATLTCTGDSNNVDKEGAVWLQQHQGHPPKLLSFRDNNRPSGVSERFSASRSRNTASLTITGLQPEDEADYYCTSWDDYLKSYVFGAGTKVTVL

SEQ ID NO: 11743 - protein, 98 aa, Homo sapiens
QAGLTQPPSVSKDLRQTATLTCTGNSNNVGNRGAAWLQQHQGHPPKLLSYRNNNRPSGISERFSASRSGTTASLTITGLQPEDEADYYCSAWDSSLSA

SEQ ID NO: 11744 - protein, 110 aa, Homo sapiens
QAGLTQPPSVSKDLRQTATLTCTGNSNNVGNRGAAWLQQHQGHPPKLLSYRNNNRPSGISERFSASRSGTTASLTITGLQPEDEADYYCSAWDSSLSAWVFGGGTKLTVL

SEQ ID NO: 11745 - protein, 98 aa, Homo sapiens
QAGLTQPPSVSKGLRQTATLTCTGNSNNVGNQGAAWLQQHQGHPPKLLSHRNNNRPSGISERLSASRSGNTASLTITGLQPEDEADYYCSAWDSTLSA

SEQ ID NO: 11746 - protein, 110 aa, Homo sapiens
QAGLTQPPSVSKGLRQTATLTCTGNSNNVGNQGAAWLQQHQGHPPKLLSHRNNNRPSGISERLSASRSGNTASLTITGLQPEDEADYYCSAWDSTLSAWVFGGGTKLTVL

SEQ ID NO: 11747 - protein, 98 aa, Homo sapiens
QAGLTQPPSVSKGLRQTATLTCTGNSNNVGNQGAAWLQQHQGHPPKLLSYRNNNRPSGISERFSASRSGNTASLTITGLQPEDEADYYCSAWDSSLSA

SEQ ID NO: 11748 - protein, 110 aa, Homo sapiens
QAGLTQPPSVSKGLRQTATLTCTGNSNNVGNQGAAWLQQHQGHPPKLLSYRNNNRPSGISERFSASRSGNTASLTITGLQPEDEADYYCSAWDSSLSAWVFGGGTKLTVL

SEQ ID NO: 11749 - protein, 97 aa, Homo sapiens
QAGLTQPPSVSKGLRQTATLTCTGNSTTFANQEAAWLQQHQGHPPKLLSRNDNRPSEISERLSASRSGNTASLTITGLQPEDEAVYYCSTWDSSLSA

SEQ ID NO: 11750 - protein, 109 aa, Homo sapiens
QAGLTQPPSVSKGLRQTATLTCTGNSTTFANQEAAWLQQHQGHPPKLLSRNDNRPSEISERLSASRSGNTASLTITGLQPEDEAVYYCSTWDSSLSAVVFGGGTKLTVL

SEQ ID NO: 11751 - protein, 96 aa, Homo sapiens
QAGLTQPPSVSYVLRQTATLTCTGSGNNVGYQGAAWLQQHQGHPPKLLSYRNNSRPSGISERFSASRSGNTASLTIDGLQPEDEADYYCSAWDTSL

SEQ ID NO: 11752 - protein, 110 aa, Homo sapiens
QAGLTQPPSVSYVLRQTATLTCTGSGNNVGYQGAAWLQQHQGHPPKLLSYRNNSRPSGISERFSASRSGNTASLTIDGLQPEDEADYYCSAWDTSLNIYVFGIGTRVSVL

SEQ ID NO: 11753 - protein, 98 aa, Homo sapiens
QAHLEQSGAEVKKPGSSVKVSCRTSGGTFISYALSWVRQAPGQGLEWMGGIMPILRTPMYALKFQGRVTIAADDSTNTVYMELTNLRSADTAVYYCAR

SEQ ID NO: 11754 - protein, 122 aa, Homo sapiens
QAHLEQSGAEVKKPGSSVKVSCRTSGGTFISYALSWVRQAPGQGLEWMGGIMPILRTPMYALKFQGRVTIAADDSTNTVYMELTNLRSADTAVYYCARAKDSGTYYQGFDIWGQGTLVTVSS

SEQ ID NO: 11755 - protein, 98 aa, Homo sapiens
QAHLEQSGPEVKKPGASVKVSCKASGYSFTTYGISWVRQVPGQGLEWMGWINTANDKIYYGQRFKGRVTLTADTSSNTAYMDLRSLRSGDTAVYYCAR

SEQ ID NO: 11756 - protein, 118 aa, Homo sapiens
QAHLEQSGPEVKKPGASVKVSCKASGYSFTTYGISWVRQVPGQGLEWMGWINTANDKIYYGQRFKGRVTLTADTSSNTAYMDLRSLRSGDTAVYYCARGGISDWFDPWGQGTLVTVSS

SEQ ID NO: 11757 - protein, 15 aa, Homo sapiens
QAIGGTDYYHYYMDV

SEQ ID NO: 11758 - protein, 15 aa, Homo sapiens
QAIPGTTYYHYYMDV

SEQ ID NO: 11759 - protein, 15 aa, Homo sapiens
QAISGTTYYNYYMDV

SEQ ID NO: 11760 - protein, 15 aa, Homo sapiens
QAISGTTYYYYYMDV

SEQ ID NO: 11761 - protein, 15 aa, Homo sapiens
QAITETTYYHYYMDV

SEQ ID NO: 11762 - protein, 15 aa, Homo sapiens
QAMGGTTYYNYYMDV

SEQ ID NO: 11763 - protein, 15 aa, Homo sapiens
QAMTATTYYNYYMDV

SEQ ID NO: 11764 - protein, 15 aa, Homo sapiens
QAMTGSTYYNYYMDV

SEQ ID NO: 11765 - protein, 97 aa, Homo sapiens
QAQLLESGGGLVKPGGSLRLSCAASGFTFSDYYMNWIRQAPGRGLEWVSYIGTDGRISYRDSVKGRFTISRDDAKNSVYLQMNGLRGEDTAVYFCAR

SEQ ID NO: 11766 - protein, 124 aa, Homo sapiens
QAQLLESGGGLVKPGGSLRLSCAASGFTFSDYYMNWIRQAPGRGLEWVSYIGTDGRISYRDSVKGRFTISRDDAKNSVYLQMNGLRGEDTAVYFCARAPPSQYRGGWTNRLDHWGLGTLVTVSS

SEQ ID NO: 11767 - protein, 98 aa, Homo sapiens
QAQLVESGGDVVQPGRSLRLSCAASGFTFRNYGMHWVRQAPGKGLEWVAVIWYDGTNKYYADSVKGRFTISRDNSKNTLYLQINSLRAEDTAIYYCTR

SEQ ID NO: 11768 - protein, 118 aa, Homo sapiens
QAQLVESGGDVVQPGRSLRLSCAASGFTFRNYGMHWVRQAPGKGLEWVAVIWYDGTNKYYADSVKGRFTISRDNSKNTLYLQINSLRAEDTAIYYCTRDVRSRYFDCWGQGTLVTVSS

SEQ ID NO: 11769 - protein, 98 aa, Homo sapiens
QAQLVESGGGLVEPGGSLRLSCAVSGFTFTDYYMSWIRQAPGKGLEWVSYISPSDYIIYYVDSVKGRFSISRDNAKNSLYLQMNGLRAEDTAVYYCAR

SEQ ID NO: 11770 - protein, 126 aa, Homo sapiens
QAQLVESGGGLVEPGGSLRLSCAVSGFTFTDYYMSWIRQAPGKGLEWVSYISPSDYIIYYVDSVKGRFSISRDNAKNSLYLQMNGLRAEDTAVYYCARVPRERCKSGDCYPIFDSWGPGVLVTVSS

SEQ ID NO: 11771 - protein, 98 aa, Homo sapiens
QAQLVQSGAEMKKPGASVKVSCKTSGYTFSYYGLSWMRQAPGQGFEWVGWISGYNGDTSYSQKLQGRVTLTTDTSTGAAYMELRSLRPDDTAVYYCAR

SEQ ID NO: 11772 - protein, 130 aa, Homo sapiens
QAQLVQSGAEMKKPGASVKVSCKTSGYTFSYYGLSWMRQAPGQGFEWVGWISGYNGDTSYSQKLQGRVTLTTDTSTGAAYMELRSLRPDDTAVYYCARDWVGKIHGSGSLYSDRNYFDTWGQGTLVTVSS

SEQ ID NO: 11773 - protein, 16 aa, Homo sapiens
QARRISVWTVVNAYDV

SEQ ID NO: 11774 - protein, 11 aa, Homo sapiens
QASEDISNYVN

SEQ ID NO: 11775 - protein, 11 aa, Homo sapiens
QASHDIRNHLS

SEQ ID NO: 11776 - protein, 11 aa, Homo sapiens
QASHDISHYLN

SEQ ID NO: 11777 - protein, 11 aa, Homo sapiens
QASHDISNYLN

SEQ ID NO: 11778 - protein, 7 aa, Homo sapiens
QASHLES

SEQ ID NO: 11779 - protein, 7 aa, Homo sapiens
QASNLES

SEQ ID NO: 11780 - protein, 11 aa, Homo sapiens
QASQDIAKYLN

SEQ ID NO: 11781 - protein, 11 aa, Homo sapiens
QASQDIGNSLN

SEQ ID NO: 11782 - protein, 11 aa, Homo sapiens
QASQDIKNHLS

SEQ ID NO: 11783 - protein, 11 aa, Homo sapiens
QASQDIRKSLN

SEQ ID NO: 11784 - protein, 11 aa, Homo sapiens
QASQDIRNHLN

SEQ ID NO: 11785 - protein, 11 aa, Homo sapiens
QASQDIRNYLN

SEQ ID NO: 11786 - protein, 11 aa, Homo sapiens
QASQDISHYLN

SEQ ID NO: 11787 - protein, 11 aa, Homo sapiens
QASQDISIYLN

SEQ ID NO: 11788 - protein, 11 aa, Homo sapiens
QASQDISKYLN

SEQ ID NO: 11789 - protein, 11 aa, Homo sapiens
QASQDISNYLN

SEQ ID NO: 11790 - protein, 11 aa, Homo sapiens
QASQSISSWLA

SEQ ID NO: 11791 - protein, 7 aa, Homo sapiens
QASSLES

SEQ ID NO: 11792 - protein, 7 aa, Homo sapiens
QASSLQS

SEQ ID NO: 11793 - protein, 7 aa, Homo sapiens
QASTLEN

SEQ ID NO: 11794 - protein, 7 aa, Homo sapiens
QASTLES

SEQ ID NO: 11795 - protein, 15 aa, Homo sapiens
QATPGTTYYYYYMDV

SEQ ID NO: 11796 - protein, 103 aa, Homo sapiens
QAVLTQPAALSASPGASASLTCTLRSDISVGSHRIYWYQQKPGSPPQYLLRYKSDSDKQQGSGVPSRFSGSKAASANAGILLISGLHSDDEADYYCMIWHSNA

SEQ ID NO: 11797 - protein, 115 aa, Homo sapiens
QAVLTQPAALSASPGASASLTCTLRSDISVGSHRIYWYQQKPGSPPQYLLRYKSDSDKQQGSGVPSRFSGSKAASANAGILLISGLHSDDEADYYCMIWHSNAWVFGGGTKLTVL

SEQ ID NO: 11798 - protein, 103 aa, Homo sapiens
QAVLTQPASLSASPGAAASLTCTLRSDLNVNTYRIYWYQQKPGSPPQYLLRYTSDSDKQQGSGVPSRFSGSKDASANAGILLISGLQSEDEADYYCMIWHSDA

SEQ ID NO: 11799 - protein, 115 aa, Homo sapiens
QAVLTQPASLSASPGAAASLTCTLRSDLNVNTYRIYWYQQKPGSPPQYLLRYTSDSDKQQGSGVPSRFSGSKDASANAGILLISGLQSEDEADYYCMIWHSDAYVIGAGTKVTVL

SEQ ID NO: 11800 - protein, 103 aa, Homo sapiens
QAVLTQPASLSASPGAAASLTCTLRSGINVNTYRVYWYQQRPGSPPRYLLRYKSDSDKQQGSGVPSRFSGSKAASANAGILLISGLQSEDEGDYFCMIWHSNT

SEQ ID NO: 11801 - protein, 115 aa, Homo sapiens
QAVLTQPASLSASPGAAASLTCTLRSGINVNTYRVYWYQQRPGSPPRYLLRYKSDSDKQQGSGVPSRFSGSKAASANAGILLISGLQSEDEGDYFCMIWHSNTWVFGGGTKLTVL

SEQ ID NO: 11802 - protein, 103 aa, Homo sapiens
QAVLTQPASLSASPGASASLTCTLHRGISVASYRIYWYRQKPGSPPQYLLRSKSDSDKQQGSGVPGRFSGSMDASANAGILLISGLQSEDEADYYCMIWYGSA

SEQ ID NO: 11803 - protein, 115 aa, Homo sapiens
QAVLTQPASLSASPGASASLTCTLHRGISVASYRIYWYRQKPGSPPQYLLRSKSDSDKQQGSGVPGRFSGSMDASANAGILLISGLQSEDEADYYCMIWYGSAYVFGTGTKVTVL

SEQ ID NO: 11804 - protein, 103 aa, Homo sapiens
QAVLTQPASLSASPGASASLTCTLRSDINLGTYRIYWYQQKPGSPPQYLLRYKSDSDKQQGSGVPSRFSGSKDASANAGILLISGLQSEDEADYYCMVWHSSA

SEQ ID NO: 11805 - protein, 115 aa, Homo sapiens
QAVLTQPASLSASPGASASLTCTLRSDINLGTYRIYWYQQKPGSPPQYLLRYKSDSDKQQGSGVPSRFSGSKDASANAGILLISGLQSEDEADYYCMVWHSSAWVFGGGTKLTVL

SEQ ID NO: 11806 - protein, 103 aa, Homo sapiens
QAVLTQPASLSASPGASASLTCTLRSDINVATSRIYWYQQKAGSPPQYLLRYKSDSDKQQGSGVPSRFSGFKDILANAGILLISGLQSEDEADYYCLMWHRNT

SEQ ID NO: 11807 - protein, 115 aa, Homo sapiens
QAVLTQPASLSASPGASASLTCTLRSDINVATSRIYWYQQKAGSPPQYLLRYKSDSDKQQGSGVPSRFSGFKDILANAGILLISGLQSEDEADYYCLMWHRNTYVFGGGTRLTVL

SEQ ID NO: 11808 - protein, 103 aa, Homo sapiens
QAVLTQPASLSASPGASASLTCTLRSDINVDTSRIFWYQQKPGSPPHYLLKYKSDSDKQQGSGVPSRFSGSKDASANAGILLISGLHSEDEADYYCMIWHDNA

SEQ ID NO: 11809 - protein, 115 aa, Homo sapiens
QAVLTQPASLSASPGASASLTCTLRSDINVDTSRIFWYQQKPGSPPHYLLKYKSDSDKQQGSGVPSRFSGSKDASANAGILLISGLHSEDEADYYCMIWHDNAWVFGGGTKLTVL

SEQ ID NO: 11810 - protein, 103 aa, Homo sapiens
QAVLTQPASLSASPGASASLTCTLRSDINVGSNRIYWYQQKPGSPPHYLLSYKSDLDNQKGSGVPSRFSGSKDTSANAGLFLISGLQSEDEADYYCMIWHRNA

SEQ ID NO: 11811 - protein, 115 aa, Homo sapiens
QAVLTQPASLSASPGASASLTCTLRSDINVGSNRIYWYQQKPGSPPHYLLSYKSDLDNQKGSGVPSRFSGSKDTSANAGLFLISGLQSEDEADYYCMIWHRNAWVFGGGTKLTVL

SEQ ID NO: 11812 - protein, 103 aa, Homo sapiens
QAVLTQPASLSASPGASASLTCTLRSDINVGTYRIYWYQQKPGSPPQYLLRYTSDSDKQQGSGVPSRFSGSKDASANAGILLISGLQSEDEADYFCMIWHNSA

SEQ ID NO: 11813 - protein, 115 aa, Homo sapiens
QAVLTQPASLSASPGASASLTCTLRSDINVGTYRIYWYQQKPGSPPQYLLRYTSDSDKQQGSGVPSRFSGSKDASANAGILLISGLQSEDEADYFCMIWHNSAYVFGTGTKVTVL

SEQ ID NO: 11814 - protein, 103 aa, Homo sapiens
QAVLTQPASLSASPGASASLTCTLRSDISVDTYRIFWYQQKPGSPPQYLLRYKSDLHKQQGSGVPSRFSGSKDASANAGILLISGLQSEDEADYYCMVWHNSA

SEQ ID NO: 11815 - protein, 115 aa, Homo sapiens
QAVLTQPASLSASPGASASLTCTLRSDISVDTYRIFWYQQKPGSPPQYLLRYKSDLHKQQGSGVPSRFSGSKDASANAGILLISGLQSEDEADYYCMVWHNSAWVFGGGTKLTVL

SEQ ID NO: 11816 - protein, 103 aa, Homo sapiens
QAVLTQPASLSASPGASASLTCTLRSGIDVGSQRIYWYQQKSGSPPQYLLRYKSDSDHHQGSGVPSRFSGFKDASANAGVLVISGLQSEDEADYYCMIWHSDA

SEQ ID NO: 11817 - protein, 115 aa, Homo sapiens
QAVLTQPASLSASPGASASLTCTLRSGIDVGSQRIYWYQQKSGSPPQYLLRYKSDSDHHQGSGVPSRFSGFKDASANAGVLVISGLQSEDEADYYCMIWHSDAWVFGGGTKLTVL

SEQ ID NO: 11818 - protein, 103 aa, Homo sapiens
QAVLTQPASLSASPGASASLTCTLRSGINVGAYRIFWYQQKPGSPPQYLLRVGSDSDEQQGSGVPSRFSGSKDASANAGILLISGLQSEDEADYYCMIWHSNT

SEQ ID NO: 11819 - protein, 115 aa, Homo sapiens
QAVLTQPASLSASPGASASLTCTLRSGINVGAYRIFWYQQKPGSPPQYLLRVGSDSDEQQGSGVPSRFSGSKDASANAGILLISGLQSEDEADYYCMIWHSNTYVFGTGTKVTVL

SEQ ID NO: 11820 - protein, 100 aa, Homo sapiens
QAVLTQPSSLSASPGAAASLTCTLRSGINVDTYRIYWYQQKPGSPPQYLLMYNSDSHKEQGSGVPSRFSGSKDASANAGILVISGLQSEDEADYYCMIWH

SEQ ID NO: 11821 - protein, 115 aa, Homo sapiens
QAVLTQPSSLSASPGAAASLTCTLRSGINVDTYRIYWYQQKPGSPPQYLLMYNSDSHKEQGSGVPSRFSGSKDASANAGILVISGLQSEDEADYYCMIWHSDAWVFGGGTKLTVL

SEQ ID NO: 11822 - protein, 103 aa, Homo sapiens
QAVLTQPSSLSASPGASASLTCTFHSGINVETYRIYWYQQKPGSPPQYLLRYTSDSDKQQGSGVPSRFSASKDASANAGILLISGLQSEDEADYYCMIWHSNA

SEQ ID NO: 11823 - protein, 115 aa, Homo sapiens
QAVLTQPSSLSASPGASASLTCTFHSGINVETYRIYWYQQKPGSPPQYLLRYTSDSDKQQGSGVPSRFSASKDASANAGILLISGLQSEDEADYYCMIWHSNAYVLGTGTKVTVL

SEQ ID NO: 11824 - protein, 103 aa, Homo sapiens
QAVLTQPSSLSASPGASASLTCTIRSGINVGAYRIYWYQQKPGSPPQYLLMYKSDSEKHQGSGVPSRFSGSKDASANAGILLISGLQSEDEADYYCLIWHSNT

SEQ ID NO: 11825 - protein, 115 aa, Homo sapiens
QAVLTQPSSLSASPGASASLTCTIRSGINVGAYRIYWYQQKPGSPPQYLLMYKSDSEKHQGSGVPSRFSGSKDASANAGILLISGLQSEDEADYYCLIWHSNTYVFGAGTKLTVL

SEQ ID NO: 11826 - protein, 103 aa, Homo sapiens
QAVLTQPSSLSASPGASASLTCTLHSGINVDTSKIFWYQQKPGSPPRYLLRYTSDSDKEHGSGVPSRFSGSTDASANAGILFISGLQPEDEADYYCMIWHSSA

SEQ ID NO: 11827 - protein, 115 aa, Homo sapiens
QAVLTQPSSLSASPGASASLTCTLHSGINVDTSKIFWYQQKPGSPPRYLLRYTSDSDKEHGSGVPSRFSGSTDASANAGILFISGLQPEDEADYYCMIWHSSAYVFGTGTKVTVL

SEQ ID NO: 11828 - protein, 103 aa, Homo sapiens
QAVLTQPSSLSASPGASASLTCTLRSDINIDTCRIFWYQQIPGSPPRYLLTYQSDSDKEQGSGVPSRFSGSKDASANAGILVISGLQSEDEADYYCMIWHSDA

SEQ ID NO: 11829 - protein, 115 aa, Homo sapiens
QAVLTQPSSLSASPGASASLTCTLRSDINIDTCRIFWYQQIPGSPPRYLLTYQSDSDKEQGSGVPSRFSGSKDASANAGILVISGLQSEDEADYYCMIWHSDAWVFGGGTKLAVL

SEQ ID NO: 11830 - protein, 103 aa, Homo sapiens
QAVLTQPSSLSASPGASASLTCTLRSGIDVGTYRIYWYQQKPGSPPQYLLMYKSDSDKQQGSGVPSRFSGSKDASANAGILLISGLQSEDEADYYCMIWHSGA

SEQ ID NO: 11831 - protein, 115 aa, Homo sapiens
QAVLTQPSSLSASPGASASLTCTLRSGIDVGTYRIYWYQQKPGSPPQYLLMYKSDSDKQQGSGVPSRFSGSKDASANAGILLISGLQSEDEADYYCMIWHSGAYVFGTGTKVTVL

SEQ ID NO: 11832 - protein, 103 aa, Homo sapiens
QAVLTQPSSLSASPGASASLTCTLRSGINVATYRIYWYQQKPGSPPQYLLMYKSDSDKQQGSGVPSRFSGSKDASANAGILLISGLQSEDEADYYCMVWHSSA

SEQ ID NO: 11833 - protein, 115 aa, Homo sapiens
QAVLTQPSSLSASPGASASLTCTLRSGINVATYRIYWYQQKPGSPPQYLLMYKSDSDKQQGSGVPSRFSGSKDASANAGILLISGLQSEDEADYYCMVWHSSAYVFGTGTKVTVL

SEQ ID NO: 11834 - protein, 103 aa, Homo sapiens
QAVLTQPSSLSASPGASASLTCTLRSGINVATYRIYWYQQKPGSPPQYLLRYKSDSDKQQGSGVPSRFSGSKDPSANAGILLISGLQSEDEADYYCMVWHNSA

SEQ ID NO: 11835 - protein, 115 aa, Homo sapiens
QAVLTQPSSLSASPGASASLTCTLRSGINVATYRIYWYQQKPGSPPQYLLRYKSDSDKQQGSGVPSRFSGSKDPSANAGILLISGLQSEDEADYYCMVWHNSAYVFGTGTKVTVL

SEQ ID NO: 11836 - protein, 103 aa, Homo sapiens
QAVLTQPSSLSASPGASASLTCTLRSGINVDTYRIFWYQQKPGSPPQYLLKYKSDSDKQQGSGVPSRFSGSKDASANAGILLISGLQSEDEADYYCMVWHNNA

SEQ ID NO: 11837 - protein, 115 aa, Homo sapiens
QAVLTQPSSLSASPGASASLTCTLRSGINVDTYRIFWYQQKPGSPPQYLLKYKSDSDKQQGSGVPSRFSGSKDASANAGILLISGLQSEDEADYYCMVWHNNAWVFGGGTKVTVL

SEQ ID NO: 11838 - protein, 102 aa, Homo sapiens
QAVLTQPSSLSASPGASASLTCTLRSGINVGTYRIYWYQQKPGSPPQYLLRYKSDSDKQQGSGVPSRFSGSKDASANAGILLISGLQSEDEADYYCMIWHSS

SEQ ID NO: 11839 - protein, 103 aa, Homo sapiens
QAVLTQPSSLSASPGASASLTCTLRSGINVGTYRIYWYQQKPGSPPQYLLRYKSDSDKQQGSGVPSRFSGSKDASANAGILLISGLQSEDEADYYCMIWHSSA

SEQ ID NO: 11840 - protein, 115 aa, Homo sapiens
QAVLTQPSSLSASPGASASLTCTLRSGINVGTYRIYWYQQKPGSPPQYLLRYKSDSDKQQGSGVPSRFSGSKDASANAGILLISGLQSEDEADYYCMIWHSSAWVFGGGTKLTVL

SEQ ID NO: 11841 - protein, 115 aa, Homo sapiens
QAVLTQPSSLSASPGASASLTCTLRSGINVGTYRIYWYQQKPGSPPQYLLRYKSDSDKQQGSGVPSRFSGSKDASANAGILLISGLQSEDEADYYCMIWHSSGGVFGGGTKLTVL

SEQ ID NO: 11842 - protein, 15 aa, Homo sapiens
QAVTGTTYYNYYMDV

SEQ ID NO: 11843 - protein, 98 aa, Homo sapiens
QAVVIQEPSLTVSPGGIVTLTCGSSTGAVTSGHYPYWFQQRPGQAPRTLIYDTNIKHSWTPARFSGSLLGDRAALTLLGAQPEDEAEYFCLLVYSVDR

SEQ ID NO: 11844 - protein, 111 aa, Homo sapiens
QAVVIQEPSLTVSPGGIVTLTCGSSTGAVTSGHYPYWFQQRPGQAPRTLIYDTNIKHSWTPARFSGSLLGDRAALTLLGAQPEDEAEYFCLLVYSVDRPGVFGGGTKLTVL

SEQ ID NO: 11845 - protein, 95 aa, Homo sapiens
QAVVTQEPSLTVSPGGTVTLTCASSTGAVTSGHYPYWFQQKPGQAPRTLISDTSNKHSWTPARFSGSLLGGKAALTLSGAQPEDEAVYYCFLSYS

SEQ ID NO: 11846 - protein, 109 aa, Homo sapiens
QAVVTQEPSLTVSPGGTVTLTCASSTGAVTSGHYPYWFQQKPGQAPRTLISDTSNKHSWTPARFSGSLLGGKAALTLSGAQPEDEAVYYCFLSYSDFWVFGGGTRLTVL

SEQ ID NO: 11847 - protein, 94 aa, Homo sapiens
QAVVTQEPSLTVSPGGTVTLTCDSSTGVVTSYHYPYWFQQRPGQAPRTLIYDTRKKHSWTPARFSGSLLGGKAALTLSGAQPEDEAEYYCLLSF

SEQ ID NO: 11848 - protein, 110 aa, Homo sapiens
QAVVTQEPSLTVSPGGTVTLTCDSSTGVVTSYHYPYWFQQRPGQAPRTLIYDTRKKHSWTPARFSGSLLGGKAALTLSGAQPEDEAEYYCLLSFNNDYFVFGGGTKLTVL

SEQ ID NO: 11849 - protein, 98 aa, Homo sapiens
QAVVTQEPSLTVSPGGTVTLTCGSSTGAVTSGHYPYWFQQKPGQAPRTLIYDTSNKHSWTPARFSGSLLGGKAALTLSGAQPEDEAEYYCLLSYSGAR

SEQ ID NO: 11850 - protein, 110 aa, Homo sapiens
QAVVTQEPSLTVSPGGTVTLTCGSSTGAVTSGHYPYWFQQKPGQAPRTLIYDTSNKHSWTPARFSGSLLGGKAALTLSGAQPEDEAEYYCLLSYSGARPLFGGGTKLTVL

SEQ ID NO: 11851 - protein, 98 aa, Homo sapiens
QAVVTQEPSLTVSPGGTVTLTCGSSTGAVTSGHYPYWFQQKPGQAPRTLIYDTSNKHSWTPARISGSLLGGKAALTLSGAQPEDEADYYCLLSYNGAR

SEQ ID NO: 11852 - protein, 109 aa, Homo sapiens
QAVVTQEPSLTVSPGGTVTLTCGSSTGAVTSGHYPYWFQQKPGQAPRTLIYDTSNKHSWTPARISGSLLGGKAALTLSGAQPEDEADYYCLLSYNGARVFGGGTKLTVL

SEQ ID NO: 11853 - protein, 97 aa, Homo sapiens
QAVVTQEPSLTVSPGGTVTLTCGSSTGAVTSGHYPYWFQQKPGQAPRTLIYDTSNKYSWTPARFSGSLLGGKAALTLSGAQPEDEAEYYCLLSYSGA

SEQ ID NO: 11854 - protein, 109 aa, Homo sapiens
QAVVTQEPSLTVSPGGTVTLTCGSSTGAVTSGHYPYWFQQKPGQAPRTLIYDTSNKYSWTPARFSGSLLGGKAALTLSGAQPEDEAEYYCLLSYSGAVVFGGGTKLTVL

SEQ ID NO: 11855 - protein, 98 aa, Homo sapiens
QAVVTQEPSLTVSPGGTVTLTCGSTTGPVTSGHYPYWFQQKPGQAPRTVIYDTTNKHSWTPAWFSGSLLGGKAALTLSGAQPEDEAEYYCLLAYSGTW

SEQ ID NO: 11856 - protein, 109 aa, Homo sapiens
QAVVTQEPSLTVSPGGTVTLTCGSTTGPVTSGHYPYWFQQKPGQAPRTVIYDTTNKHSWTPAWFSGSLLGGKAALTLSGAQPEDEAEYYCLLAYSGTWVFGGGTKLTVL

SEQ ID NO: 11857 - protein, 97 aa, Homo sapiens
QAVVTQEPSLTVSPGGTVTLTCSSTGAVTRGHQPYWIQQRPGQAPKTLIFDTRNTHSWTPARFSGSLLGDKAALTLSGAQPEDEAEYYCLVSYSDGR

SEQ ID NO: 11858 - protein, 109 aa, Homo sapiens
QAVVTQEPSLTVSPGGTVTLTCSSTGAVTRGHQPYWIQQRPGQAPKTLIFDTRNTHSWTPARFSGSLLGDKAALTLSGAQPEDEAEYYCLVSYSDGRRVFGGGTKLTVL

SEQ ID NO: 11859 - protein, 103 aa, Homo sapiens
QAVVTQPASLAASPGASVSLTCTLRSDIDVVAQRIYWYHQKSGSPPQYLLRYKSDSDNQKGSGVPSRFSGSKDVSANAGILLISGLQSEDEGDYYCVIWHKNA

SEQ ID NO: 11860 - protein, 115 aa, Homo sapiens
QAVVTQPASLAASPGASVSLTCTLRSDIDVVAQRIYWYHQKSGSPPQYLLRYKSDSDNQKGSGVPSRFSGSKDVSANAGILLISGLQSEDEGDYYCVIWHKNAYVFGGGTNLIVL

SEQ ID NO: 11861 - protein, 9 aa, Homo sapiens
QAWDGSTVV

SEQ ID NO: 11862 - protein, 9 aa, Homo sapiens
QAWDIPTVI

SEQ ID NO: 11863 - protein, 9 aa, Homo sapiens
QAWDRGLWV

SEQ ID NO: 11864 - protein, 10 aa, Homo sapiens
QAWDRNTEVV

SEQ ID NO: 11865 - protein, 9 aa, Homo sapiens
QAWDRSTAV

SEQ ID NO: 11866 - protein, 9 aa, Homo sapiens
QAWDSDTAI

SEQ ID NO: 11867 - protein, 9 aa, Homo sapiens
QAWDSNTGV

SEQ ID NO: 11868 - protein, 9 aa, Homo sapiens
QAWDSNTVV

SEQ ID NO: 11869 - protein, 10 aa, Homo sapiens
QAWDSSIFYV

SEQ ID NO: 11870 - protein, 10 aa, Homo sapiens
QAWDSSSLYV

SEQ ID NO: 11871 - protein, 11 aa, Homo sapiens
QAWDSSTAGVV

SEQ ID NO: 11872 - protein, 11 aa, Homo sapiens
QAWDSSTALYV

SEQ ID NO: 11873 - protein, 9 aa, Homo sapiens
QAWDSSTAV

SEQ ID NO: 11874 - protein, 10 aa, Homo sapiens
QAWDSSTAVV

SEQ ID NO: 11875 - protein, 10 aa, Homo sapiens
QAWDSSTAWI

SEQ ID NO: 11876 - protein, 10 aa, Homo sapiens
QAWDSSTAYV

SEQ ID NO: 11877 - protein, 10 aa, Homo sapiens
QAWDSSTDVV

SEQ ID NO: 11878 - protein, 10 aa, Homo sapiens
QAWDSSTEVV

SEQ ID NO: 11879 - protein, 9 aa, Homo sapiens
QAWDSSTGV

SEQ ID NO: 11880 - protein, 10 aa, Homo sapiens
QAWDSSTHVV

SEQ ID NO: 11881 - protein, 10 aa, Homo sapiens
QAWDSSTPVV

SEQ ID NO: 11882 - protein, 11 aa, Homo sapiens
QAWDSSTSHVV

SEQ ID NO: 11883 - protein, 9 aa, Homo sapiens
QAWDSSTSV

SEQ ID NO: 11884 - protein, 9 aa, Homo sapiens
QAWDSSTVV

SEQ ID NO: 11885 - protein, 10 aa, Homo sapiens
QAWDSSTYVV

SEQ ID NO: 11886 - protein, 8 aa, Homo sapiens
QAWDSSVV

SEQ ID NO: 11887 - protein, 9 aa, Homo sapiens
QAWDSTTDV

SEQ ID NO: 11888 - protein, 10 aa, Homo sapiens
QAWDSTTPEV

SEQ ID NO: 11889 - protein, 9 aa, Homo sapiens
QAWDTGIRV

SEQ ID NO: 11890 - protein, 11 aa, Homo sapiens
QAWDTSTANVV

SEQ ID NO: 11891 - protein, 11 aa, Homo sapiens
QAWDTSTVRYV

SEQ ID NO: 11892 - protein, 12 aa, Homo sapiens
QDGVVGPIPFDY

SEQ ID NO: 11893 - protein, 7 aa, Homo sapiens
QDIKRPS

SEQ ID NO: 11894 - protein, 7 aa, Homo sapiens
QDKERPS

SEQ ID NO: 11895 - protein, 7 aa, Homo sapiens
QDNKRPS

SEQ ID NO: 11896 - protein, 98 aa, Homo sapiens
QDQLVQSGAEVKKPGFSVKVSCKASGAIFRSQAISWVRQAPGQGLEWMGGITGVFGTTNYAQKFQGRVTITADESTTTVFMELRSLTSDDTAVYYCVR

SEQ ID NO: 11897 - protein, 121 aa, Homo sapiens
QDQLVQSGAEVKKPGFSVKVSCKASGAIFRSQAISWVRQAPGQGLEWMGGITGVFGTTNYAQKFQGRVTITADESTTTVFMELRSLTSDDTAVYYCVRHGGYHFTTHFDYWGQGTLVTVSS

SEQ ID NO: 11898 - protein, 98 aa, Homo sapiens
QDQLVQSGAEVKKPGFSVKVSCKVSGGIFRSHAISWVRQAPGQGLEWMGGITAVFGTTSYAQKFQGRVTITADESTTTVYMELRSLTSEDTAVYYCVR

SEQ ID NO: 11899 - protein, 121 aa, Homo sapiens
QDQLVQSGAEVKKPGFSVKVSCKVSGGIFRSHAISWVRQAPGQGLEWMGGITAVFGTTSYAQKFQGRVTITADESTTTVYMELRSLTSEDTAVYYCVRHGGYHFTTHFDYWGQGTLVTVSS

SEQ ID NO: 11900 - protein, 7 aa, Homo sapiens
QDSKRPS

SEQ ID NO: 11901 - protein, 7 aa, Homo sapiens
QDSQRPS

SEQ ID NO: 11902 - protein, 7 aa, Homo sapiens
QDTERPS

SEQ ID NO: 11903 - protein, 7 aa, Homo sapiens
QDTKRPS

SEQ ID NO: 11904 - protein, 7 aa, Homo sapiens
QDTRRPS

SEQ ID NO: 11905 - protein, 12 aa, Homo sapiens
QDYYDRSPYFNF

SEQ ID NO: 11906 - protein, 12 aa, Homo sapiens
QDYYDRSPYFNY

SEQ ID NO: 11907 - protein, 97 aa, Homo sapiens
QEHLQESGPGLVKPSETLSLTCTVSGGSIAYSYLNWIRQPPGKGLEWIGYMYYRGSPIYSPSLESRVTISVDTSMGQFHLTLTSVTAADTAVYYCAR

SEQ ID NO: 11908 - protein, 118 aa, Homo sapiens
QEHLQESGPGLVKPSETLSLTCTVSGGSIAYSYLNWIRQPPGKGLEWIGYMYYRGSPIYSPSLESRVTISVDTSMGQFHLTLTSVTAADTAVYYCARSLRYNFGPDDWGQGTLVTVSS

SEQ ID NO: 11909 - protein, 96 aa, Homo sapiens
QEPLQESGPGLVKPSETLSLSCNVSGASIRNYYWNWIRQAPGKGLEWIGYIYGSGSTNYNPSLKSRVTISIDTSKNQFSLRLTSVTVADTAVYFCA

SEQ ID NO: 11910 - protein, 122 aa, Homo sapiens
QEPLQESGPGLVKPSETLSLSCNVSGASIRNYYWNWIRQAPGKGLEWIGYIYGSGSTNYNPSLKSRVTISIDTSKNQFSLRLTSVTVADTAVYFCARAPLGGPTMRRYFDLWGRGTLVTVSS

SEQ ID NO: 11911 - protein, 98 aa, Homo sapiens
QEQLVESGGGVVQPGGSLRLSCAASGFTFSSYGMHWVRQGPGKGLEWVAFIRFDGSDKNYADSVKGRFTISRDDSKNTLYLQMNSLRADDTAVYYCAR

SEQ ID NO: 11912 - protein, 121 aa, Homo sapiens
QEQLVESGGGVVQPGGSLRLSCAASGFTFSSYGMHWVRQGPGKGLEWVAFIRFDGSDKNYADSVKGRFTISRDDSKNTLYLQMNSLRADDTAVYYCARDQILEQLNAFDIWGHGTLVTVSS

SEQ ID NO: 11913 - protein, 98 aa, Homo sapiens
QEQLVESGGGVVQPGRSLRLSCVASGFTFSNYGMHWVRQAPGKGLEWVAATSYDGSQKYYADSVKGRFTVSRDNSKNTLYLQMNSLRPEDTAVYYCAT

SEQ ID NO: 11914 - protein, 121 aa, Homo sapiens
QEQLVESGGGVVQPGRSLRLSCVASGFTFSNYGMHWVRQAPGKGLEWVAATSYDGSQKYYADSVKGRFTVSRDNSKNTLYLQMNSLRPEDTAVYYCATAVIVRPTNGIQYWGQGTLVTVSS

SEQ ID NO: 11915 - protein, 98 aa, Homo sapiens
QEQLVQSGAEVKKPGASVKVSCKASGYTLSDYYIQWVRQAPGQGPEWIGRINPKTGGTKYAQKFQGRVSMTRDTSISTVYMDLSRLRSDDTAIYYCAR

SEQ ID NO: 11916 - protein, 122 aa, Homo sapiens
QEQLVQSGAEVKKPGASVKVSCKASGYTLSDYYIQWVRQAPGQGPEWIGRINPKTGGTKYAQKFQGRVSMTRDTSISTVYMDLSRLRSDDTAIYYCARETGSAASSYYMDVWGKGTTVTVSS

SEQ ID NO: 11917 - protein, 98 aa, Homo sapiens
QEQLVQSGAEVKKPGASVRVSCKASGYTLANYYIQWVRQAPGQRPEWVGRINPKNGGTKYAQKFQGRVTMTRDTSISTVYMDLRSLRSDDTAVYYCAR

SEQ ID NO: 11918 - protein, 122 aa, Homo sapiens
QEQLVQSGAEVKKPGASVRVSCKASGYTLANYYIQWVRQAPGQRPEWVGRINPKNGGTKYAQKFQGRVTMTRDTSISTVYMDLRSLRSDDTAVYYCARETGSAASSYYMDVWGKGTTVTVSS

SEQ ID NO: 11919 - protein, 98 aa, Homo sapiens
QEQLVQSGAEVKKPGSSVKVSCKASGGPFFSNAISWVRQAPGQGLEWMGAINPIFSVVDYAQKFQGRLTVSADKSTNTFYMELSSLGSDDTAVYYCAR

SEQ ID NO: 11920 - protein, 122 aa, Homo sapiens
QEQLVQSGAEVKKPGSSVKVSCKASGGPFFSNAISWVRQAPGQGLEWMGAINPIFSVVDYAQKFQGRLTVSADKSTNTFYMELSSLGSDDTAVYYCARGNGYKPTLTHIDYWGQGTLVIVSS

SEQ ID NO: 11921 - protein, 98 aa, Homo sapiens
QEQVVQSGAEVKKPGASVKVSCKASRDTFSTYYVHWVRQAPGQGLEWLGIINPGGDWTRYAQKFQGRLTMTRDTSTTTVYMELSSLRSEDTAIYYCAR

SEQ ID NO: 11922 - protein, 129 aa, Homo sapiens
QEQVVQSGAEVKKPGASVKVSCKASRDTFSTYYVHWVRQAPGQGLEWLGIINPGGDWTRYAQKFQGRLTMTRDTSTTTVYMELSSLRSEDTAIYYCARDGGLRFLEWNIGRAYNWLDPWGQGTLVTVSS

SEQ ID NO: 11923 - protein, 10 aa, Homo sapiens
QERSTWPQLT

SEQ ID NO: 11924 - protein, 7 aa, Homo sapiens
QESFMYT

SEQ ID NO: 11925 - protein, 9 aa, Homo sapiens
QESNSSPFT

SEQ ID NO: 11926 - protein, 10 aa, Homo sapiens
QEYGSSPRFT

SEQ ID NO: 11927 - protein, 16 aa, Homo sapiens
QEYGWLRSNYYFYMDV

SEQ ID NO: 11928 - protein, 10 aa, Homo sapiens
QEYKSYSQWT

SEQ ID NO: 11929 - protein, 10 aa, Homo sapiens
QEYNGYSPWT

SEQ ID NO: 11930 - protein, 9 aa, Homo sapiens
QEYNIAPWT

SEQ ID NO: 11931 - protein, 10 aa, Homo sapiens
QEYNSYSQWT

SEQ ID NO: 11932 - protein, 9 aa, Homo sapiens
QEYNTYSCT

SEQ ID NO: 11933 - protein, 10 aa, Homo sapiens
QEYNTYSQWT

SEQ ID NO: 11934 - protein, 10 aa, Homo sapiens
QEYRSYSQWT

SEQ ID NO: 11935 - protein, 9 aa, Homo sapiens
QEYSGYSVT

SEQ ID NO: 11936 - protein, 10 aa, Homo sapiens
QEYYSYSRWT

SEQ ID NO: 11937 - protein, 14 aa, Homo sapiens
QFCGDCTAYRHFDC

SEQ ID NO: 11938 - protein, 9 aa, Homo sapiens
QFDSWSGYL

SEQ ID NO: 11939 - protein, 15 aa, Homo sapiens
QFIPVGPYYYYYMDV

SEQ ID NO: 11940 - protein, 12 aa, Homo sapiens
QFWDSSTDLLYV

SEQ ID NO: 11941 - protein, 9 aa, Homo sapiens
QGADTSGTG

SEQ ID NO: 11942 - protein, 11 aa, Homo sapiens
QGDILRDYYAS

SEQ ID NO: 11943 - protein, 11 aa, Homo sapiens
QGDNLRKYYAS

SEQ ID NO: 11944 - protein, 11 aa, Homo sapiens
QGDRLRRNYAS

SEQ ID NO: 11945 - protein, 11 aa, Homo sapiens
QGDSLRRYYAS

SEQ ID NO: 11946 - protein, 11 aa, Homo sapiens
QGDSLRSFYAS

SEQ ID NO: 11947 - protein, 11 aa, Homo sapiens
QGDSLRSSYAS

SEQ ID NO: 11948 - protein, 11 aa, Homo sapiens
QGDSLRSYYAN

SEQ ID NO: 11949 - protein, 11 aa, Homo sapiens
QGDSLRSYYAS

SEQ ID NO: 11950 - protein, 11 aa, Homo sapiens
QGDSLRTFYAS

SEQ ID NO: 11951 - protein, 11 aa, Homo sapiens
QGDSLRTYYAN

SEQ ID NO: 11952 - protein, 14 aa, Homo sapiens
QGGDYVEGEFYFDY

SEQ ID NO: 11953 - protein, 12 aa, Homo sapiens
QGGVVGATPLDY

SEQ ID NO: 11954 - protein, 15 aa, Homo sapiens
QGISETTYSYYYMDV

SEQ ID NO: 11955 - protein, 15 aa, Homo sapiens
QGPSGTTYYHYYMDV

SEQ ID NO: 11956 - protein, 98 aa, Homo sapiens
QGQLVESGGGVVQPGRSLRLSCAPSGLSISGFGMDWVRQTPGKGLEWVADISHNGARRHYADSVKGRFTVSRDNSNNTVYLQMNSLRPEDTAVYYCVR

SEQ ID NO: 11957 - protein, 123 aa, Homo sapiens
QGQLVESGGGVVQPGRSLRLSCAPSGLSISGFGMDWVRQTPGKGLEWVADISHNGARRHYADSVKGRFTVSRDNSNNTVYLQMNSLRPEDTAVYYCVRDDYERSGYYWALRHWGQGALVTVSS

SEQ ID NO: 11958 - protein, 98 aa, Homo sapiens
QGQLVQSGAEEKKPGASVKVSCKASGYIFTIYGLSWVRQAPGQGLEWMGWISSHNGDMRVAQKFQDRVTMTTDTSTNTGYMELRSLTSDDTAVYYCAR

SEQ ID NO: 11959 - protein, 127 aa, Homo sapiens
QGQLVQSGAEEKKPGASVKVSCKASGYIFTIYGLSWVRQAPGQGLEWMGWISSHNGDMRVAQKFQDRVTMTTDTSTNTGYMELRSLTSDDTAVYYCARDIMPREIRSYYSYYHMDVWGKGTTVTVSS

SEQ ID NO: 11960 - protein, 98 aa, Homo sapiens
QGQLVQSGAEMKKPGASVKVSCKASGYNLNNYGISWIRQAPGQGPEWMGWISGHNGDTKYAQSLQGRVTMTTDTSTSTAYMELRSLRSDDTAVYYCAR

SEQ ID NO: 11961 - protein, 130 aa, Homo sapiens
QGQLVQSGAEMKKPGASVKVSCKASGYNLNNYGISWIRQAPGQGPEWMGWISGHNGDTKYAQSLQGRVTMTTDTSTSTAYMELRSLRSDDTAVYYCARDWIGKVYGSGTYYTDRHYFDIWGQGTLVTVSS

SEQ ID NO: 11962 - protein, 98 aa, Homo sapiens
QGQLVQSGAEMKKPGASVKVSCKASGYTLTNYGLSWIRQAPGQGLEWMGWISGYNGDTNYHQNLQGRVTMTTDTSTNTAYMELRSLRADDTAIYYCAR

SEQ ID NO: 11963 - protein, 130 aa, Homo sapiens
QGQLVQSGAEMKKPGASVKVSCKASGYTLTNYGLSWIRQAPGQGLEWMGWISGYNGDTNYHQNLQGRVTMTTDTSTNTAYMELRSLRADDTAIYYCARDWIGKVHGSGAYYSDRHYFDMWGQGSLVTVSS

SEQ ID NO: 11964 - protein, 98 aa, Homo sapiens
QGQVVQSGAEVKKPGSSVKVSCKASGGTFSRHAVNWVRQAPGQGLEWMGGLISIFRTAEYAQKFQGRLTITTDELTSTAYMELSSLRSDDTAVYYCAR

SEQ ID NO: 11965 - protein, 121 aa, Homo sapiens
QGQVVQSGAEVKKPGSSVKVSCKASGGTFSRHAVNWVRQAPGQGLEWMGGLISIFRTAEYAQKFQGRLTITTDELTSTAYMELSSLRSDDTAVYYCARGATYHFTSPIDYWGPGTLLTVTS

SEQ ID NO: 11966 - protein, 14 aa, Homo sapiens
QGRIGTSRYGDFDS

SEQ ID NO: 11967 - protein, 15 aa, Homo sapiens
QGTPGTTYYHYYMDV

SEQ ID NO: 11968 - protein, 15 aa, Homo sapiens
QGTPGTTYYNYYMDV

SEQ ID NO: 11969 - protein, 15 aa, Homo sapiens
QGTSGTNYVYYYMDV

SEQ ID NO: 11970 - protein, 13 aa, Homo sapiens
QGVGTINYVYFDY

SEQ ID NO: 11971 - protein, 15 aa, Homo sapiens
QGVSETTYYNYYMDL

SEQ ID NO: 11972 - protein, 15 aa, Homo sapiens
QGVSGTNYYYYYMDI

SEQ ID NO: 11973 - protein, 15 aa, Homo sapiens
QGVSGTTYYHYYMDV

SEQ ID NO: 11974 - protein, 15 aa, Homo sapiens
QGVSGTTYYNYYMDL

SEQ ID NO: 11975 - protein, 15 aa, Homo sapiens
QGVSGTTYYNYYMDV

SEQ ID NO: 11976 - protein, 15 aa, Homo sapiens
QGVSGTTYYYYYMDI

SEQ ID NO: 11977 - protein, 15 aa, Homo sapiens
QGVSGTTYYYYYMDV

SEQ ID NO: 11978 - protein, 11 aa, Homo sapiens
QGYGDYVVFDY

SEQ ID NO: 11979 - protein, 11 aa, Homo sapiens
QHFSTSLRIFT

SEQ ID NO: 11980 - protein, 9 aa, Homo sapiens
QHLDTYPLT

SEQ ID NO: 11981 - protein, 9 aa, Homo sapiens
QHLKSYPLS

SEQ ID NO: 11982 - protein, 14 aa, Homo sapiens
QHLWESSGYRCFDN

SEQ ID NO: 11983 - protein, 5 aa, Homo sapiens
QHNYT

SEQ ID NO: 11984 - protein, 10 aa, Homo sapiens
QHPTNGYIDY

SEQ ID NO: 11985 - protein, 10 aa, Homo sapiens
QHRSGWPPIT

SEQ ID NO: 11986 - protein, 9 aa, Homo sapiens
QHYADSVWT

SEQ ID NO: 11987 - protein, 10 aa, Homo sapiens
QHYDDVPPWT

SEQ ID NO: 11988 - protein, 9 aa, Homo sapiens
QHYDGYPRT

SEQ ID NO: 11989 - protein, 9 aa, Homo sapiens
QHYDNLPLT

SEQ ID NO: 11990 - protein, 9 aa, Homo sapiens
QHYDSSRGT

SEQ ID NO: 11991 - protein, 9 aa, Homo sapiens
QHYDSSSLT

SEQ ID NO: 11992 - protein, 9 aa, Homo sapiens
QHYDSYSGT

SEQ ID NO: 11993 - protein, 9 aa, Homo sapiens
QHYDTYSGT

SEQ ID NO: 11994 - protein, 10 aa, Homo sapiens
QHYGGSPRIT

SEQ ID NO: 11995 - protein, 9 aa, Homo sapiens
QHYGPSPLT

SEQ ID NO: 11996 - protein, 10 aa, Homo sapiens
QHYGRSPPYT

SEQ ID NO: 11997 - protein, 10 aa, Homo sapiens
QHYGRSPRWT

SEQ ID NO: 11998 - protein, 9 aa, Homo sapiens
QHYGSSFLT

SEQ ID NO: 11999 - protein, 9 aa, Homo sapiens
QHYGSSLRA

SEQ ID NO: 12000 - protein, 9 aa, Homo sapiens
QHYGSSLWT

SEQ ID NO: 12001 - protein, 10 aa, Homo sapiens
QHYGSSPGYT

SEQ ID NO: 12002 - protein, 10 aa, Homo sapiens
QHYGSSPMYT

SEQ ID NO: 12003 - protein, 10 aa, Homo sapiens
QHYGSSPRWT

SEQ ID NO: 12004 - protein, 9 aa, Homo sapiens
QHYGSSSLT

SEQ ID NO: 12005 - protein, 10 aa, Homo sapiens
QHYGTSLLST

SEQ ID NO: 12006 - protein, 9 aa, Homo sapiens
QHYGTSPRT

SEQ ID NO: 12007 - protein, 9 aa, Homo sapiens
QHYHSFPFI

SEQ ID NO: 12008 - protein, 9 aa, Homo sapiens
QHYNDYPYT

SEQ ID NO: 12009 - protein, 9 aa, Homo sapiens
QHYNFYRFT

SEQ ID NO: 12010 - protein, 9 aa, Homo sapiens
QHYNFYSWT

SEQ ID NO: 12011 - protein, 9 aa, Homo sapiens
QHYNGYCPH

SEQ ID NO: 12012 - protein, 9 aa, Homo sapiens
QHYNNWLYT

SEQ ID NO: 12013 - protein, 9 aa, Homo sapiens
QHYNNWPHT

SEQ ID NO: 12014 - protein, 10 aa, Homo sapiens
QHYNPNSFYT

SEQ ID NO: 12015 - protein, 9 aa, Homo sapiens
QHYNSYSAT

SEQ ID NO: 12016 - protein, 9 aa, Homo sapiens
QHYNSYSGT

SEQ ID NO: 12017 - protein, 9 aa, Homo sapiens
QHYNSYSRT

SEQ ID NO: 12018 - protein, 11 aa, Homo sapiens
QHYNTYFPEGT

SEQ ID NO: 12019 - protein, 9 aa, Homo sapiens
QHYNTYPYT

SEQ ID NO: 12020 - protein, 9 aa, Homo sapiens
QHYNTYSCT

SEQ ID NO: 12021 - protein, 9 aa, Homo sapiens
QHYNTYSGT

SEQ ID NO: 12022 - protein, 9 aa, Homo sapiens
QHYNTYSWT

SEQ ID NO: 12023 - protein, 9 aa, Homo sapiens
QHYNTYSYT

SEQ ID NO: 12024 - protein, 9 aa, Homo sapiens
QHYNTYWCA

SEQ ID NO: 12025 - protein, 6 aa, Homo sapiens
QHYRDT

SEQ ID NO: 12026 - protein, 5 aa, Homo sapiens
QHYRT

SEQ ID NO: 12027 - protein, 10 aa, Homo sapiens
QHYSNWPPWT

SEQ ID NO: 12028 - protein, 9 aa, Homo sapiens
QHYSVYSRT

SEQ ID NO: 12029 - protein, 10 aa, Homo sapiens
QHYTNWPPWT

SEQ ID NO: 12030 - protein, 9 aa, Homo sapiens
QHYVGSPLT

SEQ ID NO: 12031 - protein, 9 aa, Homo sapiens
QHYYDFPYT

SEQ ID NO: 12032 - protein, 9 aa, Homo sapiens
QHYYITPYT

SEQ ID NO: 12033 - protein, 9 aa, Homo sapiens
QHYYSFSNT

SEQ ID NO: 12034 - protein, 98 aa, Homo sapiens
QIELVQSGAEVKRPGASVKVSCKASGYSITNYAHYWVRQARGQSLEWMGRINTGHGDTLYSHKFQDRVTITRDISANTIYMELRSLRSEDTAVYFCAR

SEQ ID NO: 12035 - protein, 123 aa, Homo sapiens
QIELVQSGAEVKRPGASVKVSCKASGYSITNYAHYWVRQARGQSLEWMGRINTGHGDTLYSHKFQDRVTITRDISANTIYMELRSLRSEDTAVYFCARADFWDSFFGGHFDHWGQGTLVTVSS

SEQ ID NO: 12036 - protein, 17 aa, Homo sapiens
QIIPFFGTTNTAQRFRG

SEQ ID NO: 12037 - protein, 17 aa, Homo sapiens
QIIPIFGTANSAHKFRG

SEQ ID NO: 12038 - protein, 17 aa, Homo sapiens
QIKSDGSNIKYADAVKG

SEQ ID NO: 12039 - protein, 17 aa, Homo sapiens
QIMPIFGTPKYAQKFQG

SEQ ID NO: 12040 - protein, 17 aa, Homo sapiens
QIMPIFGTPKYAQRFQG

SEQ ID NO: 12041 - protein, 19 aa, Homo sapiens
QIPQLHSCGGDCYAAPFDY

SEQ ID NO: 12042 - protein, 98 aa, Homo sapiens
QIQLQQWGTRLLKPSETLSLTCAVSGESFSGFFCSWIRQSPGKELEWIGEINQSGTAKYNPSLTSRVTMSLDTSKNQLSLNMTSVTAADTAIYFCSRG

SEQ ID NO: 12043 - protein, 118 aa, Homo sapiens
QIQLQQWGTRLLKPSETLSLTCAVSGESFSGFFCSWIRQSPGKELEWIGEINQSGTAKYNPSLTSRVTMSLDTSKNQLSLNMTSVTAADTAIYFCSRGQWLAPLGNLWGPGTLVSVSS

SEQ ID NO: 12044 - protein, 98 aa, Homo sapiens
QIQLVQSGAEVKKPGASVKVSCKASGYTFKNYGISWVRQAPGQGLEWMGWISGHNGDTSYAQKFQGRVTMTTDTSASTAYMDLRSLRSDDTAVYYCAR

SEQ ID NO: 12045 - protein, 120 aa, Homo sapiens
QIQLVQSGAEVKKPGASVKVSCKASGYTFKNYGISWVRQAPGQGLEWMGWISGHNGDTSYAQKFQGRVTMTTDTSASTAYMDLRSLRSDDTAVYYCARDGGIYGDSLDYWGQGALVTVSS

SEQ ID NO: 12046 - protein, 98 aa, Homo sapiens
QIQLVQSGGEVKKPGASVKVSCTASGYTFVKYGIDWVRQAPGQGLEWVGWSSPYNGNTKYAQKFQGRVTLTTDTSTRTAYMELRSLTSDDTAVYFCAR

SEQ ID NO: 12047 - protein, 124 aa, Homo sapiens
QIQLVQSGGEVKKPGASVKVSCTASGYTFVKYGIDWVRQAPGQGLEWVGWSSPYNGNTKYAQKFQGRVTLTTDTSTRTAYMELRSLTSDDTAVYFCARDFAGRGGSDLGYFDYWGQGTLVTVSS

SEQ ID NO: 12048 - protein, 17 aa, Homo sapiens
QISFSDNEIYYRDSVKG

SEQ ID NO: 12049 - protein, 99 aa, Homo sapiens
QITLKESGPTLVKPTQPLTLTCTFSGFSLSTRRVGVAWIRQPPGKALEWLGIIYWDDDKRYTPSLENRLTITKDTSKNQVVLSMTNMDPVDTATYYCAH

SEQ ID NO: 12050 - protein, 125 aa, Homo sapiens
QITLKESGPTLVKPTQPLTLTCTFSGFSLSTRRVGVAWIRQPPGKALEWLGIIYWDDDKRYTPSLENRLTITKDTSKNQVVLSMTNMDPVDTATYYCAHIVVVPAAESTDAFDVWGQGTKVTVSS

SEQ ID NO: 12051 - protein, 98 aa, Homo sapiens
QITLKESGPTLVKPTQTLMLTCSFSGFSLSTRGVGVGWIRQPPGKALEWLGIIYWDDDKRYSPSLKNRITITKDTSKSQVVLTMSNMDPVDTATYFCA

SEQ ID NO: 12052 - protein, 126 aa, Homo sapiens
QITLKESGPTLVKPTQTLMLTCSFSGFSLSTRGVGVGWIRQPPGKALEWLGIIYWDDDKRYSPSLKNRITITKDTSKSQVVLTMSNMDPVDTATYFCAHLTSVTSSNSGFDAFDFWGQGTMVIVSS

SEQ ID NO: 12053 - protein, 99 aa, Homo sapiens
QITLKESGPTLVKPTQTLTLSCTFSGFSLSATGVGVGWIRQPPGKALEWLAIIYWDDDKRYSPSLKTRLTITKDTSKTQVVLIMTDMDPVDTATYYCAH

SEQ ID NO: 12054 - protein, 126 aa, Homo sapiens
QITLKESGPTLVKPTQTLTLSCTFSGFSLSATGVGVGWIRQPPGKALEWLAIIYWDDDKRYSPSLKTRLTITKDTSKTQVVLIMTDMDPVDTATYYCAHMTTAFGGVTRLDAFDVWGQGTMVTVSS

SEQ ID NO: 12055 - protein, 99 aa, Homo sapiens
QITLKESGPTLVKPTQTLTLTCTFSGFSLITRGEGVAWIRQPPGKALEWLAHIYWNDNKHYSPSLKSRLSVTKDTSKNQVVFTMSNMDPVDTATYYCAH

SEQ ID NO: 12056 - protein, 129 aa, Homo sapiens
QITLKESGPTLVKPTQTLTLTCTFSGFSLITRGEGVAWIRQPPGKALEWLAHIYWNDNKHYSPSLKSRLSVTKDTSKNQVVFTMSNMDPVDTATYYCAHWRDYDIETSYSTGGDAFDVWGQGAMVIVSS

SEQ ID NO: 12057 - protein, 100 aa, Homo sapiens
QITLKESGPTLVKPTQTLTLTCTFSGFSLRTFGMGVGWLRQPPGKALEWLALVYWDDDKRYSPSLRSRLTITQDTSKNQVVLTMTNMDPVDTATYYCGFR

SEQ ID NO: 12058 - protein, 123 aa, Homo sapiens
QITLKESGPTLVKPTQTLTLTCTFSGFSLRTFGMGVGWLRQPPGKALEWLALVYWDDDKRYSPSLRSRLTITQDTSKNQVVLTMTNMDPVDTATYYCGFRWAVANFTQGFDPWGPGTLVTVSS

SEQ ID NO: 12059 - protein, 99 aa, Homo sapiens
QITLKESGPTLVKPTQTLTLTCTFSGFSLSTSAVGVGWIRQPPGKALEWLALIYWNDDKRYSPSLKSRVTIAKDTSKNQVVLTVTNMDPVDTATYYCAR

SEQ ID NO: 12060 - protein, 128 aa, Homo sapiens
QITLKESGPTLVKPTQTLTLTCTFSGFSLSTSAVGVGWIRQPPGKALEWLALIYWNDDKRYSPSLKSRVTIAKDTSKNQVVLTVTNMDPVDTATYYCARNRGGVYDSGTYYIGDFDYWGQGTLVTVSS

SEQ ID NO: 12061 - protein, 98 aa, Homo sapiens
QITLKESGPTLVKPTQTLTLTCTFSGFSLSTSGVGVGWIRQPPGKALEWLAFIYWDDDKRYSPSLKSRLTITKDTSKNQVVLTMTNMDPVDTGTYYCA

SEQ ID NO: 12062 - protein, 121 aa, Homo sapiens
QITLKESGPTLVKPTQTLTLTCTFSGFSLSTSGVGVGWIRQPPGKALEWLAFIYWDDDKRYSPSLKSRLTITKDTSKNQVVLTMTNMDPVDTGTYYCALNYNYDSSAYSGWGQGTLVTVSS

SEQ ID NO: 12063 - protein, 99 aa, Homo sapiens
QITLKESGPTLVKPTQTLTLTCTFSGFSLSTSGVGVGWIRQPPGKALEWLALIYWDDDKRYSPSLKSRLTITKDTSKNQVVLTMTNMDPVDTATYYCAH

SEQ ID NO: 12064 - protein, 117 aa, Homo sapiens
QITLKESGPTLVKPTQTLTLTCTFSGFSLSTSGVGVGWIRQPPGKALEWLALIYWDDDKRYSPSLKSRLTITKDTSKNQVVLTMTNMDPVDTATYYCAHALRTFDYWGQGTLVTVSS

SEQ ID NO: 12065 - protein, 100 aa, Homo sapiens
QITLKESGPTLVKPTQTLTLTCTFSGFSLSTSGVGVGWIRQPPGKALEWLALIYWDDDKRYSPSLKSRLTITKDTSKNQVVLTMTNMDPVDTATYYCAHR

SEQ ID NO: 12066 - protein, 123 aa, Homo sapiens
QITLKESGPTLVKPTQTLTLTCTFSGFSLSTSGVGVGWIRQPPGKALEWLALIYWDDDKRYSPSLKSRLTITKDTSKNQVVLTMTNMDPVDTATYYCAHRRYYGSGSRWFDPWGQGTLVTVSS

SEQ ID NO: 12067 - protein, 126 aa, Homo sapiens
QITLKESGPTLVKPTQTLTLTCTFSGFSLSTSGVGVGWIRQPPGKALEWLALIYWDDDKRYSPSLKSRLTITKDTSKNQVVLTMTNMDPVDTATYYCAHRTYYYDSSGYFNWFDPWGQGTLVTVSS

SEQ ID NO: 12068 - protein, 128 aa, Homo sapiens
QITLKESGPTLVKPTQTLTLTCTFSGFSLSTSGVGVGWIRQPPGKALEWLALIYWDDDKRYSPSLKSRLTITKDTSKNQVVLTMTNMDPVDTATYYCAHSASHPLEMATISFDAFDIWGQGTMVTVSS

SEQ ID NO: 12069 - protein, 128 aa, Homo sapiens
QITLKESGPTLVKPTQTLTLTCTFSGFSLSTSGVGVGWIRQPPGKALEWLALIYWDDDKRYSPSLKSRLTITKDTSKNQVVLTMTNMDPVDTATYYCAHSFRLAGIAAADGIGIIDYWGQGTLVTVSS

SEQ ID NO: 12070 - protein, 99 aa, Homo sapiens
QITLKESGPTLVKPTQTLTLTCTFSGFSLSTSGVGVGWIRQPPGKALEWLALIYWNDDKRYSPSLKSRLTITKDTSKNQVVLTMTNMDPVDTATYYCAH

SEQ ID NO: 12071 - protein, 124 aa, Homo sapiens
QITLKESGPTLVKPTQTLTLTCTFSGFSLSTSGVGVGWIRQPPGKALEWLALIYWNDDKRYSPSLKSRLTITKDTSKNQVVLTMTNMDPVDTATYYCAHAYYDYVWWGGWFDPWGQGTLVTVSS

SEQ ID NO: 12072 - protein, 124 aa, Homo sapiens
QITLKESGPTLVKPTQTLTLTCTFSGFSLSTSGVGVGWIRQPPGKALEWLALIYWNDDKRYSPSLKSRLTITKDTSKNQVVLTMTNMDPVDTATYYCAHTRIAAAGTAEYFQHWGQGTLVTVSS

SEQ ID NO: 12073 - protein, 99 aa, Homo sapiens
QITLKESGPTLVKPTQTLTLTCTFSGFSLSTSGVGVGWIRQPPGKALEWLALIYWNDGNRYSPSLKNRVTITKDTSKNQVVLTMTNMDPVDTATYYCAH

SEQ ID NO: 12074 - protein, 128 aa, Homo sapiens
QITLKESGPTLVKPTQTLTLTCTFSGFSLSTSGVGVGWIRQPPGKALEWLALIYWNDGNRYSPSLKNRVTITKDTSKNQVVLTMTNMDPVDTATYYCAHNRGGVYDSGTYYIGDFDHWGQGILVTVSS

SEQ ID NO: 12075 - protein, 99 aa, Homo sapiens
QITLKESGPTLVKPTQTLTLTCTFSGFSLTTSGVGVGWIRQPPGKALEWLALIYWDDDKRYRPSLKSRLTITKDTSKNQVVLTMTNIDPVDTATYYCAH

SEQ ID NO: 12076 - protein, 121 aa, Homo sapiens
QITLKESGPTLVKPTQTLTLTCTFSGFSLTTSGVGVGWIRQPPGKALEWLALIYWDDDKRYRPSLKSRLTITKDTSKNQVVLTMTNIDPVDTATYYCAHVDGAYGGAFDIWGQGTMVTVSS

SEQ ID NO: 12077 - protein, 99 aa, Homo sapiens
QITLKESGPTLVNPTQTLTLTCTFSGFSLTSTGVGVAWIRQPPGEALEWLGIIYWDDDKRYRASLENRLTITKDTSKNEVVLRMTTMDPVDTATYYCAH

SEQ ID NO: 12078 - protein, 127 aa, Homo sapiens
QITLKESGPTLVNPTQTLTLTCTFSGFSLTSTGVGVAWIRQPPGEALEWLGIIYWDDDKRYRASLENRLTITKDTSKNEVVLRMTTMDPVDTATYYCAHIVTDFRGVVHHYDAFDVWGQGTTVTVSS

SEQ ID NO: 12079 - protein, 99 aa, Homo sapiens
QITLKESGPTLVRPTQTLTLTCTFSGFSLSTTGVGVSWIRQPPGEALEWLAVIYWDDDKRYSPSLKSRLTITKDTSKNQVVLTMTNMDPVDTGTYYCAH

SEQ ID NO: 12080 - protein, 126 aa, Homo sapiens
QITLKESGPTLVRPTQTLTLTCTFSGFSLSTTGVGVSWIRQPPGEALEWLAVIYWDDDKRYSPSLKSRLTITKDTSKNQVVLTMTNMDPVDTGTYYCAHLMISFGGVFRDDAFDIWGQGTMVTVSS

SEQ ID NO: 12081 - protein, 100 aa, Homo sapiens
QITLKESGPTLVTPTQTLTLTCNFSGFSLKTSGVAVGWIRQPPGKALEWLALVYWDDDKRYSPSLKSRLTITKDTSKNQVVLTMTDMDPVDTGTYYCAHR

SEQ ID NO: 12082 - protein, 130 aa, Homo sapiens
QITLKESGPTLVTPTQTLTLTCNFSGFSLKTSGVAVGWIRQPPGKALEWLALVYWDDDKRYSPSLKSRLTITKDTSKNQVVLTMTDMDPVDTGTYYCAHRQGVYESLTGYFGSRGHFDFWGQGTLVTVSS

SEQ ID NO: 12083 - protein, 100 aa, Homo sapiens
QITLKESGPTVVKPTQTLTLTCTFSGFSLDTSGVGVGWIRQPPGKALEFLALIFWDGAEHYIPSLRNRLTITKDTAKNQVVLTLANMDPMDTGTYYCAHR

SEQ ID NO: 12084 - protein, 123 aa, Homo sapiens
QITLKESGPTVVKPTQTLTLTCTFSGFSLDTSGVGVGWIRQPPGKALEFLALIFWDGAEHYIPSLRNRLTITKDTAKNQVVLTLANMDPMDTGTYYCAHRRRRGSDWYTLDYWGQGTLVTVSS

SEQ ID NO: 12085 - protein, 99 aa, Homo sapiens
QITLKESGRTLVKPTETLMLTCTFSGFSLTTTGVGVGWIRQPPGEALEWLAVIYWDDDKRYSPSLKSRLTITKDTSKNQVVLTMTNMDPVDTGTYYCAH

SEQ ID NO: 12086 - protein, 126 aa, Homo sapiens
QITLKESGRTLVKPTETLMLTCTFSGFSLTTTGVGVGWIRQPPGEALEWLAVIYWDDDKRYSPSLKSRLTITKDTSKNQVVLTMTNMDPVDTGTYYCAHLMITFGGIIRDDAFDIWGQGTMVTVSS

SEQ ID NO: 12087 - protein, 99 aa, Homo sapiens
QITLKETGPALVKPKQTLTLTCTFSGFSLSTKRVGVAWIRQPPGGALEWLAVIYWDDDKRYSPSLENRLTIYKDTSRNQVVLTMTNMDPVDTATYYCAH

SEQ ID NO: 12088 - protein, 125 aa, Homo sapiens
QITLKETGPALVKPKQTLTLTCTFSGFSLSTKRVGVAWIRQPPGGALEWLAVIYWDDDKRYSPSLENRLTIYKDTSRNQVVLTMTNMDPVDTATYYCAHIVVVPAAQSKDAFDFWGPGAVVTVSS

SEQ ID NO: 12089 - protein, 99 aa, Homo sapiens
QITLQESGPTLVKPTQTLTLTCTFSGFSLTTSGVGVGWIRQPPGKALEWLALIYWDNDKLYSPSLESRLTITKDTSKNQVVLTMTSMEPLDTATYFCAH

SEQ ID NO: 12090 - protein, 129 aa, Homo sapiens
QITLQESGPTLVKPTQTLTLTCTFSGFSLTTSGVGVGWIRQPPGKALEWLALIYWDNDKLYSPSLESRLTITKDTSKNQVVLTMTSMEPLDTATYFCAHLSPRHYDVVSGYYGYAFQIWGQGTMVTVSS

SEQ ID NO: 12091 - protein, 15 aa, Homo sapiens
QKLLWFGELSPPTEY

SEQ ID NO: 12092 - protein, 9 aa, Homo sapiens
QKYDGAPWT

SEQ ID NO: 12093 - protein, 9 aa, Homo sapiens
QKYDSAPLT

SEQ ID NO: 12094 - protein, 9 aa, Homo sapiens
QKYDSAPRT

SEQ ID NO: 12095 - protein, 9 aa, Homo sapiens
QKYNSAPLT

SEQ ID NO: 12096 - protein, 11 aa, Homo sapiens
QKYNSAPPGIT

SEQ ID NO: 12097 - protein, 10 aa, Homo sapiens
QKYNSAPPLT

SEQ ID NO: 12098 - protein, 10 aa, Homo sapiens
QKYNSAPPWT

SEQ ID NO: 12099 - protein, 9 aa, Homo sapiens
QKYNSAPQT

SEQ ID NO: 12100 - protein, 9 aa, Homo sapiens
QKYNSASGT

SEQ ID NO: 12101 - protein, 9 aa, Homo sapiens
QKYNSDSGT

SEQ ID NO: 12102 - protein, 12 aa, Homo sapiens
QKYSSTWYSIDY

SEQ ID NO: 12103 - protein, 99 aa, Homo sapiens
QLELQESGPRLVKPSETLSLTCTVSGGSINSGSNCWGWIRQPPGKGLEWLGSICSNGSTYYNPSLKSRVTISADTSKNQFSLKLTSVTAAQSAIFYCTR

SEQ ID NO: 12104 - protein, 121 aa, Homo sapiens
QLELQESGPRLVKPSETLSLTCTVSGGSINSGSNCWGWIRQPPGKGLEWLGSICSNGSTYYNPSLKSRVTISADTSKNQFSLKLTSVTAAQSAIFYCTRHGGYSGNAFDLWGQGTMVVVSS

SEQ ID NO: 12105 - protein, 8 aa, Homo sapiens
QLGGGDCL

SEQ ID NO: 12106 - protein, 99 aa, Homo sapiens
QLHLQLSGPRLVRPSETLSLTCTVSGGSVGSTSYYWAWIRQPPGKGLEWIGTIYYSGTTYYSPSLKRRVSMSVDTSKNQFSLKLTSVTAADTALYYCAT

SEQ ID NO: 12107 - protein, 117 aa, Homo sapiens
QLHLQLSGPRLVRPSETLSLTCTVSGGSVGSTSYYWAWIRQPPGKGLEWIGTIYYSGTTYYSPSLKRRVSMSVDTSKNQFSLKLTSVTAADTALYYCATVGTVTRFWGQGALVTVSS

SEQ ID NO: 12108 - protein, 98 aa, Homo sapiens
QLHLQQWGAGLLKPSETLSLTCSVSGGSFSNYYWSWVRQPPGKGLEWLGEINQNGRTRANPSLESRVTMSLDSSKNNLSLTLRSVTAADTAVYYCARG

SEQ ID NO: 12109 - protein, 127 aa, Homo sapiens
QLHLQQWGAGLLKPSETLSLTCSVSGGSFSNYYWSWVRQPPGKGLEWLGEINQNGRTRANPSLESRVTMSLDSSKNNLSLTLRSVTAADTAVYYCARGTHYRYDFLSGSRADWLDIWGQGSLVIVSS

SEQ ID NO: 12110 - protein, 99 aa, Homo sapiens
QLLLQESGPGLVKPSETLSLTCTVSGGSISTSSYYWGWIRQPPGKGLEYIGSIYYSGITYYNPSLKSRVTISVDTSKNQFSLKLSSVTATDTAVYYCAR

SEQ ID NO: 12111 - protein, 126 aa, Homo sapiens
QLLLQESGPGLVKPSETLSLTCTVSGGSISTSSYYWGWIRQPPGKGLEYIGSIYYSGITYYNPSLKSRVTISVDTSKNQFSLKLSSVTATDTAVYYCARQEYGWLRSNYYFYMDVWGKGTTVTVSS

SEQ ID NO: 12112 - protein, 94 aa, Homo sapiens
QLMQSGAEVKKPGSSVKVSCKASGGTFNSYAITWVRQAPGQGPEWMGGINPMFGITDYAQQFQGRLTITADKIPTIVYMELSSLRSEDTAVYYC

SEQ ID NO: 12113 - protein, 119 aa, Homo sapiens
QLMQSGAEVKKPGSSVKVSCKASGGTFNSYAITWVRQAPGQGPEWMGGINPMFGITDYAQQFQGRLTITADKIPTIVYMELSSLRSEDTAVYYCGGSGSYHLASPLSSWGQGTLVTVSS

SEQ ID NO: 12114 - protein, 98 aa, Homo sapiens
QLQESGPGLVKPSGTLSLTCTVSGGSISSSTYYWAWIRQPPGKGLEWIGSIFHSGTTSYYNPSLKSRVTMSLDTSRNQFSLRVRSLTAADTAVYYCAR

SEQ ID NO: 12115 - protein, 120 aa, Homo sapiens
QLQESGPGLVKPSGTLSLTCTVSGGSISSSTYYWAWIRQPPGKGLEWIGSIFHSGTTSYYNPSLKSRVTMSLDTSRNQFSLRVRSLTAADTAVYYCARLAGGSFFWFDPWGQGTLVTVSS

SEQ ID NO: 12116 - protein, 97 aa, Homo sapiens
QLQESGTGLVRPSETLSLTCGVSGASITTTGFFWGWIRQPPGKGLEWIGTIYSYGTVYYNPSLQSRVVISMETSKNYFSLRLTSVTAADTAVYYCAR

SEQ ID NO: 12117 - protein, 124 aa, Homo sapiens
QLQESGTGLVRPSETLSLTCGVSGASITTTGFFWGWIRQPPGKGLEWIGTIYSYGTVYYNPSLQSRVVISMETSKNYFSLRLTSVTAADTAVYYCARRHHDPLTGQYSPWFDPWGQGTLVTVSS

SEQ ID NO: 12118 - protein, 99 aa, Homo sapiens
QLQLHQSGPGLVKTSETLSLTCTVSGGSISSDSSYWGWIRQSPGKGLEWIGTISNSGTTYYSPSLRSRTTISVDTSKNQFSLKLTSATAADTALYHCAR

SEQ ID NO: 12119 - protein, 128 aa, Homo sapiens
QLQLHQSGPGLVKTSETLSLTCTVSGGSISSDSSYWGWIRQSPGKGLEWIGTISNSGTTYYSPSLRSRTTISVDTSKNQFSLKLTSATAADTALYHCAREVCRSLTCLFWSGYSVDLWGQGTLVTVSS

SEQ ID NO: 12120 - protein, 99 aa, Homo sapiens
QLQLKESGPGLVKPSEPLSLTCTVSGGSIRSSLSYWGWIRQPPGKGLEWIGTIYFSGNNYLNPSLKSRVTTSVDTSKNQLSLKLKSVTAADTAVYYCAR

SEQ ID NO: 12121 - protein, 122 aa, Homo sapiens
QLQLKESGPGLVKPSEPLSLTCTVSGGSIRSSLSYWGWIRQPPGKGLEWIGTIYFSGNNYLNPSLKSRVTTSVDTSKNQLSLKLKSVTAADTAVYYCARRIPHMNFDAFDIWGQGIMVTVSS

SEQ ID NO: 12122 - protein, 98 aa, Homo sapiens
QLQLLESGPGLVKPSETLSLTCTVSGGSINSNYYWGWIRQPPGKGLEWIASIYYSGNTDYNPSLKSRVTISVDTSKNQFSLKLSSVTAADTAVYFCAR

SEQ ID NO: 12123 - protein, 121 aa, Homo sapiens
QLQLLESGPGLVKPSETLSLTCTVSGGSINSNYYWGWIRQPPGKGLEWIASIYYSGNTDYNPSLKSRVTISVDTSKNQFSLKLSSVTAADTAVYFCARGTTDIVSTIIDYWGQGTLVTVSS

SEQ ID NO: 12124 - protein, 99 aa, Homo sapiens
QLQLQELGPGLVKPSETLSLTCTVSGGSISSSKYYWGWIRQPPGKGLEWIGSIYYSGTTYYNPSLKSRVTIFVDTSKNQFSLKLSSVTAADTAVYYCAR

SEQ ID NO: 12125 - protein, 125 aa, Homo sapiens
QLQLQELGPGLVKPSETLSLTCTVSGGSISSSKYYWGWIRQPPGKGLEWIGSIYYSGTTYYNPSLKSRVTIFVDTSKNQFSLKLSSVTAADTAVYYCARHFPDYFGSVYDAFDIWGQGTMVTVSS

SEQ ID NO: 12126 - protein, 98 aa, Homo sapiens
QLQLQESAPRLVKPSETVSLTCTVSGGSISSSNYYWGWIRQPPGKGLEWIGSVYYRGTTYYGPSFGGRATISGDTSKNQFSLNLISVTAADTAMYYCA

SEQ ID NO: 12127 - protein, 123 aa, Homo sapiens
QLQLQESAPRLVKPSETVSLTCTVSGGSISSSNYYWGWIRQPPGKGLEWIGSVYYRGTTYYGPSFGGRATISGDTSKNQFSLNLISVTAADTAMYYCASSHLGTVGMGAFNIWGHGTMVTVSS

SEQ ID NO: 12128 - protein, 99 aa, Homo sapiens
QLQLQESGPGLLKPSETLSLTCTVSGDSISSSSYYWGWVRQPPGKGLEWIGNIYYRGTTYYNPSLKSRVTISLDTSKTQFSLDLNSVTAADTALYYCAR

SEQ ID NO: 12129 - protein, 126 aa, Homo sapiens
QLQLQESGPGLLKPSETLSLTCTVSGDSISSSSYYWGWVRQPPGKGLEWIGNIYYRGTTYYNPSLKSRVTISLDTSKTQFSLDLNSVTAADTALYYCARQARRISVWTVVNAYDVWGQGTMVIVSS

SEQ ID NO: 12130 - protein, 98 aa, Homo sapiens
QLQLQESGPGLVKPSETLSLNCTVSGGSITSNNFYWGWIRQPPGKGLEWIGSIHYSGKTYYNPSLKSRLTISGDMSKEQFSLKLRSVTAADTAVYYCV

SEQ ID NO: 12131 - protein, 122 aa, Homo sapiens
QLQLQESGPGLVKPSETLSLNCTVSGGSITSNNFYWGWIRQPPGKGLEWIGSIHYSGKTYYNPSLKSRLTISGDMSKEQFSLKLRSVTAADTAVYYCVSWGVLSFGTKFDPWGQGALVIVSS

SEQ ID NO: 12132 - protein, 99 aa, Homo sapiens
QLQLQESGPGLVKPSETLSLTCAVSGASFSSSYYYWGWIRQPPGKGLEWIGNIYYSRNTFYNPSLKSRVSISVDTSKSQFSLNLRSVTAADTAVYYCAR

SEQ ID NO: 12133 - protein, 123 aa, Homo sapiens
QLQLQESGPGLVKPSETLSLTCAVSGASFSSSYYYWGWIRQPPGKGLEWIGNIYYSRNTFYNPSLKSRVSISVDTSKSQFSLNLRSVTAADTAVYYCARGVSDAYNSYAFDIWGQGTVVTVSS

SEQ ID NO: 12134 - protein, 99 aa, Homo sapiens
QLQLQESGPGLVKPSETLSLTCNVSGGSISSSRYYWGWVRQSPGKGLEWLGSIYFSGSTYYNPSLKSRVFIFVDTPKDQFSLRLISVTAADTAVYYCAR

SEQ ID NO: 12135 - protein, 123 aa, Homo sapiens
QLQLQESGPGLVKPSETLSLTCNVSGGSISSSRYYWGWVRQSPGKGLEWLGSIYFSGSTYYNPSLKSRVFIFVDTPKDQFSLRLISVTAADTAVYYCARHGYIARDHYGMDVWGQGTTVTVSS

SEQ ID NO: 12136 - protein, 96 aa, Homo sapiens
QLQLQESGPGLVKPSETLSLTCSVSGDSMKNYHWSWIRQSPGKGLQWIGYVSYNGNTIYSPSLESRVVMSIDTSNSQFSLKLRSVTAADTALYYCT

SEQ ID NO: 12137 - protein, 131 aa, Homo sapiens
QLQLQESGPGLVKPSETLSLTCSVSGDSMKNYHWSWIRQSPGKGLQWIGYVSYNGNTIYSPSLESRVVMSIDTSNSQFSLKLRSVTAADTALYYCTGGWKEELGGSPGSVGGHYYYAFNVWGQGTMVTVSS

SEQ ID NO: 12138 - protein, 99 aa, Homo sapiens
QLQLQESGPGLVKPSETLSLTCSVSGGSISSNSYYWGWIRQPPGKGLEWIGSIYYSGGTYYNPSLKSRVTISVDTSKNQFSLKLSSVTAADTAVYYCAR

SEQ ID NO: 12139 - protein, 125 aa, Homo sapiens
QLQLQESGPGLVKPSETLSLTCSVSGGSISSNSYYWGWIRQPPGKGLEWIGSIYYSGGTYYNPSLKSRVTISVDTSKNQFSLKLSSVTAADTAVYYCARDVDDSHGYYAWHFDYWGQGTLVTVSS

SEQ ID NO: 12140 - protein, 98 aa, Homo sapiens
QLQLQESGPGLVKPSETLSLTCTVSGASFNTNDYFWVWIRQPPGKGLEWIGTIYYSGGTYFNPSLRSRVAMSVDTSKNQFSLKVTSVTAADTAVYSCA

SEQ ID NO: 12141 - protein, 124 aa, Homo sapiens
QLQLQESGPGLVKPSETLSLTCTVSGASFNTNDYFWVWIRQPPGKGLEWIGTIYYSGGTYFNPSLRSRVAMSVDTSKNQFSLKVTSVTAADTAVYSCAAMARAIFLTEGGLDIWGQGAMVIVSS

SEQ ID NO: 12142 - protein, 99 aa, Homo sapiens
QLQLQESGPGLVKPSETLSLTCTVSGDSISSGNYYWGWIRQPPGMGLEWIGNIYYSGHAYYNPSLESRVTISVDTSRNQFSLMLTSVTAADTAVYYCTR

SEQ ID NO: 12143 - protein, 117 aa, Homo sapiens
QLQLQESGPGLVKPSETLSLTCTVSGDSISSGNYYWGWIRQPPGMGLEWIGNIYYSGHAYYNPSLESRVTISVDTSRNQFSLMLTSVTAADTAVYYCTRGLAAANVWGQGTPVTVSS

SEQ ID NO: 12144 - protein, 99 aa, Homo sapiens
QLQLQESGPGLVKPSETLSLTCTVSGGSIRSNSYYWGWIRQPPGKGLEWIGSIYYNGDTYYNPSLKSRLTISVDTSKNQFSLKLTSVTAADTAVYYCAR

SEQ ID NO: 12145 - protein, 130 aa, Homo sapiens
QLQLQESGPGLVKPSETLSLTCTVSGGSIRSNSYYWGWIRQPPGKGLEWIGSIYYNGDTYYNPSLKSRLTISVDTSKNQFSLKLTSVTAADTAVYYCARHEARVGVIRVDVVSGHWFDPWGQGTLVSVSS

SEQ ID NO: 12146 - protein, 99 aa, Homo sapiens
QLQLQESGPGLVKPSETLSLTCTVSGGSISGGSYYWGWIRQPPGKGLEWVGNIYYSGHTYYNPSLESRVTISVDTSKNQFSLMLTSVTAADTAVYYCTR

SEQ ID NO: 12147 - protein, 117 aa, Homo sapiens
QLQLQESGPGLVKPSETLSLTCTVSGGSISGGSYYWGWIRQPPGKGLEWVGNIYYSGHTYYNPSLESRVTISVDTSKNQFSLMLTSVTAADTAVYYCTRGLAAANVWGQGTTVTVSS

SEQ ID NO: 12148 - protein, 99 aa, Homo sapiens
QLQLQESGPGLVKPSETLSLTCTVSGGSISSGRYYWGWIRQPPGKGLEWIGNIYYSGETYYTPSLESRVTISVDTSKNQFSLKLTSVIAADTAVYYCTR

SEQ ID NO: 12149 - protein, 117 aa, Homo sapiens
QLQLQESGPGLVKPSETLSLTCTVSGGSISSGRYYWGWIRQPPGKGLEWIGNIYYSGETYYTPSLESRVTISVDTSKNQFSLKLTSVIAADTAVYYCTRGLAAANVWGQGTTVTVSS

SEQ ID NO: 12150 - protein, 99 aa, Homo sapiens
QLQLQESGPGLVKPSETLSLTCTVSGGSISSGSSYWGWIRQPPGKGLEWIGGVYYTGSTYYNPSLKSRVTISVDTSKNQFSLRLSSVTAADTAVYYCTR

SEQ ID NO: 12151 - protein, 122 aa, Homo sapiens
QLQLQESGPGLVKPSETLSLTCTVSGGSISSGSSYWGWIRQPPGKGLEWIGGVYYTGSTYYNPSLKSRVTISVDTSKNQFSLRLSSVTAADTAVYYCTRWKTTGLMGAFDIWGQGTMVAVSS

SEQ ID NO: 12152 - protein, 99 aa, Homo sapiens
QLQLQESGPGLVKPSETLSLTCTVSGGSISSGSYYWGWIRQPPGKGLEWIQTIHYSGSTYYNPSLKSRVTFSVDTSKNQFSLRLSSVTAADTAVYYCAR

SEQ ID NO: 12153 - protein, 123 aa, Homo sapiens
QLQLQESGPGLVKPSETLSLTCTVSGGSISSGSYYWGWIRQPPGKGLEWIQTIHYSGSTYYNPSLKSRVTFSVDTSKNQFSLRLSSVTAADTAVYYCARVVVRYYYYYYMDVWGKGTTVTVSS

SEQ ID NO: 12154 - protein, 99 aa, Homo sapiens
QLQLQESGPGLVKPSETLSLTCTVSGGSISSNSFYWGWIRQPPGRGLEWIANIYYSGSTYHNPSLKSRVTVSVETSKSQFSLRLSSVTAADTAMYYCAR

SEQ ID NO: 12155 - protein, 125 aa, Homo sapiens
QLQLQESGPGLVKPSETLSLTCTVSGGSISSNSFYWGWIRQPPGRGLEWIANIYYSGSTYHNPSLKSRVTVSVETSKSQFSLRLSSVTAADTAMYYCARYGRDIAAAGIDAFDIWGQGTMVTVSS

SEQ ID NO: 12156 - protein, 99 aa, Homo sapiens
QLQLQESGPGLVKPSETLSLTCTVSGGSISSRSYYWGWIRQPPGKGLEWIGSIFYTGSTNYKPSLSSRVTISVDTSKNQVSLRLSSVTAADTAVYYCAR

SEQ ID NO: 12157 - protein, 123 aa, Homo sapiens
QLQLQESGPGLVKPSETLSLTCTVSGGSISSRSYYWGWIRQPPGKGLEWIGSIFYTGSTNYKPSLSSRVTISVDTSKNQVSLRLSSVTAADTAVYYCARWFSGRYYSFGFDNWGQGTLVTVSS

SEQ ID NO: 12158 - protein, 99 aa, Homo sapiens
QLQLQESGPGLVKPSETLSLTCTVSGGSISSSGYYWGWIRQPPGKGLEWIGTIYYRGSTYYNPSLKSRVTISVDTSKNQFSLKLSSVTAADTAVYYCAR

SEQ ID NO: 12159 - protein, 125 aa, Homo sapiens
QLQLQESGPGLVKPSETLSLTCTVSGGSISSSGYYWGWIRQPPGKGLEWIGTIYYRGSTYYNPSLKSRVTISVDTSKNQFSLKLSSVTAADTAVYYCARVFKEGIVATINAFDIWGQGTMVTVSS

SEQ ID NO: 12160 - protein, 98 aa, Homo sapiens
QLQLQESGPGLVKPSETLSLTCTVSGGSISSSSYYWGWIRQPPGKGLEWIGNIFYTGSAYYNPSLKSRVTISVDTPKNQFSLQLNSVTAADTAVYYCA

SEQ ID NO: 12161 - protein, 120 aa, Homo sapiens
QLQLQESGPGLVKPSETLSLTCTVSGGSISSSSYYWGWIRQPPGKGLEWIGNIFYTGSAYYNPSLKSRVTISVDTPKNQFSLQLNSVTAADTAVYYCASLVAFPQIPDYWGQGTLVTVSS

SEQ ID NO: 12162 - protein, 99 aa, Homo sapiens
QLQLQESGPGLVKPSETLSLTCTVSGGSISSSSYYWGWIRQPPGKGLEWIGSIYYSGNTYYNSSLKSRVTISQDTSKNQFSLKLSSVTAADTAVYYCAR

SEQ ID NO: 12163 - protein, 123 aa, Homo sapiens
QLQLQESGPGLVKPSETLSLTCTVSGGSISSSSYYWGWIRQPPGKGLEWIGSIYYSGNTYYNSSLKSRVTISQDTSKNQFSLKLSSVTAADTAVYYCARPRGATNYYHYMDVWGQGTTVTVSS

SEQ ID NO: 12164 - protein, 99 aa, Homo sapiens
QLQLQESGPGLVKPSETLSLTCTVSGGSISSSSYYWGWIRQPPGKGLEWIGSIYYSGSAYYNPSLKSRVTISVDTSKTQFSLKLSSVTAADTAVYYCVR

SEQ ID NO: 12165 - protein, 125 aa, Homo sapiens
QLQLQESGPGLVKPSETLSLTCTVSGGSISSSSYYWGWIRQPPGKGLEWIGSIYYSGSAYYNPSLKSRVTISVDTSKTQFSLKLSSVTAADTAVYYCVRTHYYDSSGATNAFDIWGQGTMVTVSS

SEQ ID NO: 12166 - protein, 98 aa, Homo sapiens
QLQLQESGPGLVKPSETLSLTCTVSGGSISSSSYYWGWIRQPPGKGLEWIGSIYYSGSTYYNPSLKSRVTISVDTSKNQFSLKLSSVTAADTAVYYCA

SEQ ID NO: 12167 - protein, 99 aa, Homo sapiens
QLQLQESGPGLVKPSETLSLTCTVSGGSISSSSYYWGWIRQPPGKGLEWIGSIYYSGSTYYNPSLKSRVTISVDTSKNQFSLKLSSVTAADTAVYYCAG

SEQ ID NO: 12168 - protein, 124 aa, Homo sapiens
QLQLQESGPGLVKPSETLSLTCTVSGGSISSSSYYWGWIRQPPGKGLEWIGSIYYSGSTYYNPSLKSRVTISVDTSKNQFSLKLSSVTAADTAVYYCAGSYPPVMTAIGYFDLWGRGTLVTVSS

SEQ ID NO: 12169 - protein, 124 aa, Homo sapiens
QLQLQESGPGLVKPSETLSLTCTVSGGSISSSSYYWGWIRQPPGKGLEWIGSIYYSGSTYYNPSLKSRVTISVDTSKNQFSLKLSSVTAADTAVYYCAKDSSSWFGPGFLFDYWGQGTLVTVSS

SEQ ID NO: 12170 - protein, 99 aa, Homo sapiens
QLQLQESGPGLVKPSETLSLTCTVSGGSISSSSYYWGWIRQPPGKGLEWIGSIYYSGSTYYNPSLKSRVTISVDTSKNQFSLKLSSVTAADTAVYYCAR

SEQ ID NO: 12171 - protein, 124 aa, Homo sapiens
QLQLQESGPGLVKPSETLSLTCTVSGGSISSSSYYWGWIRQPPGKGLEWIGSIYYSGSTYYNPSLKSRVTISVDTSKNQFSLKLSSVTAADTAVYYCARDLFDYYGSGGRFDPWGQGTLVTVSS

SEQ ID NO: 12172 - protein, 124 aa, Homo sapiens
QLQLQESGPGLVKPSETLSLTCTVSGGSISSSSYYWGWIRQPPGKGLEWIGSIYYSGSTYYNPSLKSRVTISVDTSKNQFSLKLSSVTAADTAVYYCAREGVTTEGYYYYMDVWGKGTTVTVSS

SEQ ID NO: 12173 - protein, 122 aa, Homo sapiens
QLQLQESGPGLVKPSETLSLTCTVSGGSISSSSYYWGWIRQPPGKGLEWIGSIYYSGSTYYNPSLKSRVTISVDTSKNQFSLKLSSVTAADTAVYYCARHKNGQWLVTFDYWGQGTLVTVSS

SEQ ID NO: 12174 - protein, 124 aa, Homo sapiens
QLQLQESGPGLVKPSETLSLTCTVSGGSISSSSYYWGWIRQPPGKGLEWIGSIYYSGSTYYNPSLKSRVTISVDTSKNQFSLKLSSVTAADTAVYYCARHPPPDILTGYYLDYWGQGTLVTVSS

SEQ ID NO: 12175 - protein, 128 aa, Homo sapiens
QLQLQESGPGLVKPSETLSLTCTVSGGSISSSSYYWGWIRQPPGKGLEWIGSIYYSGSTYYNPSLKSRVTISVDTSKNQFSLKLSSVTAADTAVYYCARHRGSITMVRGVDLGYFDYWGQGTLVTVSS

SEQ ID NO: 12176 - protein, 127 aa, Homo sapiens
QLQLQESGPGLVKPSETLSLTCTVSGGSISSSSYYWGWIRQPPGKGLEWIGSIYYSGSTYYNPSLKSRVTISVDTSKNQFSLKLSSVTAADTAVYYCARPHHHDYGDYYVSGWFDPWGQGTLVTVSS

SEQ ID NO: 12177 - protein, 121 aa, Homo sapiens
QLQLQESGPGLVKPSETLSLTCTVSGGSISSSSYYWGWIRQPPGKGLEWIGSIYYSGSTYYNPSLKSRVTISVDTSKNQFSLKLSSVTAADTAVYYCARQGYGDYVVFDYWGQGTLVTVSS

SEQ ID NO: 12178 - protein, 125 aa, Homo sapiens
QLQLQESGPGLVKPSETLSLTCTVSGGSISSSSYYWGWIRQPPGKGLEWIGSIYYSGSTYYNPSLKSRVTISVDTSKNQFSLKLSSVTAADTAVYYCARQKLLWFGELSPPTEYWGQGTLVTVSS

SEQ ID NO: 12179 - protein, 124 aa, Homo sapiens
QLQLQESGPGLVKPSETLSLTCTVSGGSISSSSYYWGWIRQPPGKGLEWIGSIYYSGSTYYNPSLKSRVTISVDTSKNQFSLKLSSVTAADTAVYYCARQQLAPAIGGDYFDYWGQGTLVTVSS

SEQ ID NO: 12180 - protein, 124 aa, Homo sapiens
QLQLQESGPGLVKPSETLSLTCTVSGGSISSSSYYWGWIRQPPGKGLEWIGSIYYSGSTYYNPSLKSRVTISVDTSKNQFSLKLSSVTAADTAVYYCARRGSGSYYNAYYFDYWGQGTLVTVSS

SEQ ID NO: 12181 - protein, 124 aa, Homo sapiens
QLQLQESGPGLVKPSETLSLTCTVSGGSISSSSYYWGWIRQPPGKGLEWIGSIYYSGSTYYNPSLKSRVTISVDTSKNQFSLKLSSVTAADTAVYYCARSGQSYNFWSGYFDYWGQGTLVTVSS

SEQ ID NO: 12182 - protein, 121 aa, Homo sapiens
QLQLQESGPGLVKPSETLSLTCTVSGGSISSSSYYWGWIRQPPGKGLEWIGSIYYSGSTYYNPSLKSRVTISVDTSKNQFSLKLSSVTAADTAVYYCARTDSSSLNWFDPWGQGTLVTVSS

SEQ ID NO: 12183 - protein, 99 aa, Homo sapiens
QLQLQESGPGLVKPSETLSLTCTVSGGSISSSSYYWGWIRQPPGKGLEWIGSIYYSGSTYYNPSLKSRVTISVDTSKNQFSLKLSSVTAADTAVYYCAS

SEQ ID NO: 12184 - protein, 121 aa, Homo sapiens
QLQLQESGPGLVKPSETLSLTCTVSGGSISSSSYYWGWIRQPPGKGLEWIGSIYYSGSTYYNPSLKSRVTISVDTSKNQFSLKLSSVTAADTAVYYCASHVWFGEFLFDYWGQGTLVTVSS

SEQ ID NO: 12185 - protein, 132 aa, Homo sapiens
QLQLQESGPGLVKPSETLSLTCTVSGGSISSSSYYWGWIRQPPGKGLEWIGSIYYSGSTYYNPSLKSRVTISVDTSKNQFSLKLSSVTAADTAVYYCATSGPGRITMVRGVIAPIFDWFDPWGQGTLVTVSS

SEQ ID NO: 12186 - protein, 99 aa, Homo sapiens
QLQLQESGPGLVKPSETLSLTCTVSGGSISSSSYYWGWIRQPPGQGLEWIGSISHIGSTYYNPSLKSRVTISVDTSKNQFSLRLSSVTAADTALYYCAR

SEQ ID NO: 12187 - protein, 127 aa, Homo sapiens
QLQLQESGPGLVKPSETLSLTCTVSGGSISSSSYYWGWIRQPPGQGLEWIGSISHIGSTYYNPSLKSRVTISVDTSKNQFSLRLSSVTAADTALYYCARGDCSNTNCYVHYYYMDVWGKGTTVTVSS

SEQ ID NO: 12188 - protein, 97 aa, Homo sapiens
QLQLQESGPGLVKPSETLSLTCTVSGGSISSYYWSWIRQSAGKGLEWIGRIFTSGTTSYNPSLKSRVTMSIDTSKNQLSLKVNSVTAADTAVYYCAR

SEQ ID NO: 12189 - protein, 126 aa, Homo sapiens
QLQLQESGPGLVKPSETLSLTCTVSGGSISSYYWSWIRQSAGKGLEWIGRIFTSGTTSYNPSLKSRVTMSIDTSKNQLSLKVNSVTAADTAVYYCARDPDFSTVRGPWDFYGVDVWGQGTTVTVSS

SEQ ID NO: 12190 - protein, 99 aa, Homo sapiens
QLQLQESGPGLVKPSETLSLTCTVSGGSITSSTYYWGWIRQPPGKGLEWIGSIYYSGSTYNNPSLKSRVTISLDTSKNQVSLRLSSVTAADTAVYYCAR

SEQ ID NO: 12191 - protein, 122 aa, Homo sapiens
QLQLQESGPGLVKPSETLSLTCTVSGGSITSSTYYWGWIRQPPGKGLEWIGSIYYSGSTYNNPSLKSRVTISLDTSKNQVSLRLSSVTAADTAVYYCARRPRFGELSQPDYWGQGTLVTVSS

SEQ ID NO: 12192 - protein, 99 aa, Homo sapiens
QLQLQESGPGLVKPSETLSLTCTVSGVSITAQRYSWGWVRQPPGRGLEWIGTLYYTGITYQSPSLKSRLTTSVDSSKNLFSLKLRSVTAADTAVYYCVR

SEQ ID NO: 12193 - protein, 126 aa, Homo sapiens
QLQLQESGPGLVKPSETLSLTCTVSGVSITAQRYSWGWVRQPPGRGLEWIGTLYYTGITYQSPSLKSRLTTSVDSSKNLFSLKLRSVTAADTAVYYCVRHRSVFVTGKYGDYFDYWGQGALVAVSS

SEQ ID NO: 12194 - protein, 99 aa, Homo sapiens
QLQLQESGPGLVKPSETLSLTCTVSGVSITNKRYSWGWIRQPPGKGLEWIATIYYNDRTYENPSLKSRLTASADTSKNQFSLNLRSVTAADTGVYYCAR

SEQ ID NO: 12195 - protein, 126 aa, Homo sapiens
QLQLQESGPGLVKPSETLSLTCTVSGVSITNKRYSWGWIRQPPGKGLEWIATIYYNDRTYENPSLKSRLTASADTSKNQFSLNLRSVTAADTGVYYCARHRSVIVTGRYGDYFDYWGQGALVAVSS

SEQ ID NO: 12196 - protein, 98 aa, Homo sapiens
QLQLQESGPGLVKPSETLSLTCTVSVGSIRSSRYYWAWIRQPPGKGLEWIGSIDYSGRTYYNPSLKSRVSASVDTSRNQFSLKLTSVTSADTAVYYCA

SEQ ID NO: 12197 - protein, 125 aa, Homo sapiens
QLQLQESGPGLVKPSETLSLTCTVSVGSIRSSRYYWAWIRQPPGKGLEWIGSIDYSGRTYYNPSLKSRVSASVDTSRNQFSLKLTSVTSADTAVYYCATLKDHYGSGSPEFFHHWGQGTLVTVSS

SEQ ID NO: 12198 - protein, 99 aa, Homo sapiens
QLQLQESGPGLVKTSETLSLSCTVSGGSISSSNSYWGWIRQPPGKGLEWIATISYSGDTYYNPSLESRVTISVDTSKNQFSLKMRSVTAADTAVYFCAR

SEQ ID NO: 12199 - protein, 129 aa, Homo sapiens
QLQLQESGPGLVKTSETLSLSCTVSGGSISSSNSYWGWIRQPPGKGLEWIATISYSGDTYYNPSLESRVTISVDTSKNQFSLKMRSVTAADTAVYFCARDPGFHVLLKAYAIRAAFDIWGQGTMVTVSS

SEQ ID NO: 12200 - protein, 99 aa, Homo sapiens
QLQLQESGPGLVKTSETLSLTCTVSGASISSSSYYWGWIRQPPGKGLEWIGTIYSSGTAYYNPSLKSRVTISLKMSKNQFSLKLSSVTAADTAIYYCAR

SEQ ID NO: 12201 - protein, 118 aa, Homo sapiens
QLQLQESGPGLVKTSETLSLTCTVSGASISSSSYYWGWIRQPPGKGLEWIGTIYSSGTAYYNPSLKSRVTISLKMSKNQFSLKLSSVTAADTAIYYCARDFDRGFDYWGQGSLVTVSS

SEQ ID NO: 12202 - protein, 99 aa, Homo sapiens
QLQLQESGPGLVKTSETLSLTCTVSGGSVSSSAYYWGWIRQPPGKGLEWVGSINYNGNAYYNPSLKSRVTLSVDTSQNQFSLRLSSVAAADTAVYFCAR

SEQ ID NO: 12203 - protein, 124 aa, Homo sapiens
QLQLQESGPGLVKTSETLSLTCTVSGGSVSSSAYYWGWIRQPPGKGLEWVGSINYNGNAYYNPSLKSRVTLSVDTSQNQFSLRLSSVAAADTAVYFCARHNRAGGYYWDFFHPWGQGTLVTASS

SEQ ID NO: 12204 - protein, 98 aa, Homo sapiens
QLQLQESGPGLVNPSETVSLTCTVSGDSISTSNYYWGWIRQPPGKGLEWTGSIHYSGSTYYNPSLKSRVTISVDTSKNQFSLRLSSVTAADTAVYYCA

SEQ ID NO: 12205 - protein, 125 aa, Homo sapiens
QLQLQESGPGLVNPSETVSLTCTVSGDSISTSNYYWGWIRQPPGKGLEWTGSIHYSGSTYYNPSLKSRVTISVDTSKNQFSLRLSSVTAADTAVYYCASYCSTASCPTRRAFDIWGQGTMVTVSS

SEQ ID NO: 12206 - protein, 99 aa, Homo sapiens
QLQLQESGPGLVRPSETLSLTCSVSGGSISSSNYYWSWVRQPPGKGLEWVASIFYRKSNHYNESLRSRATISADASKNEIFLFLTSVTAADTATYYCAR

SEQ ID NO: 12207 - protein, 121 aa, Homo sapiens
QLQLQESGPGLVRPSETLSLTCSVSGGSISSSNYYWSWVRQPPGKGLEWVASIFYRKSNHYNESLRSRATISADASKNEIFLFLTSVTAADTATYYCARLFWSGQSYFDSWGQGTLVTVSP

SEQ ID NO: 12208 - protein, 99 aa, Homo sapiens
QLQLQESGSGLVKPSQTLSLTCAVSGGSISIGGYSGSWIRQPPGKGLEWIGYISHSGITYYNPSLKSRVTMSVDTSENHFSLKLRSVTAADTAVYFCAR

SEQ ID NO: 12209 - protein, 117 aa, Homo sapiens
QLQLQESGSGLVKPSQTLSLTCAVSGGSISIGGYSGSWIRQPPGKGLEWIGYISHSGITYYNPSLKSRVTMSVDTSENHFSLKLRSVTAADTAVYFCARGDTTMADWGQGTLVTVSS

SEQ ID NO: 12210 - protein, 98 aa, Homo sapiens
QLQLQESGSGLVKPSQTLSLTCAVSGGSISSDGYSCSWIRQPLGKGLEWIGYISHSGITYFNPSLRSRVTISVDRSRNQFSLKLTSVSAADTAVYYCA

SEQ ID NO: 12211 - protein, 117 aa, Homo sapiens
QLQLQESGSGLVKPSQTLSLTCAVSGGSISSDGYSCSWIRQPLGKGLEWIGYISHSGITYFNPSLRSRVTISVDRSRNQFSLKLTSVSAADTAVYYCARGETFLDVWGQGTTVTVSS

SEQ ID NO: 12212 - protein, 98 aa, Homo sapiens
QLQLQESGSRLVKPSQTLSLTCVVSGGSISSGGYSWSWIRQPPGKGLEWIGFIYHSGSYYNPSLKSRVTISVDRSKNQFSLELSSVTAADTAVYYCAR

SEQ ID NO: 12213 - protein, 122 aa, Homo sapiens
QLQLQESGSRLVKPSQTLSLTCVVSGGSISSGGYSWSWIRQPPGKGLEWIGFIYHSGSYYNPSLKSRVTISVDRSKNQFSLELSSVTAADTAVYYCARETMVQGVMGYFDYWGQGSLVTVSS

SEQ ID NO: 12214 - protein, 98 aa, Homo sapiens
QLQLQQWGAGLLKPSETLSLTCSVHGGSFSGYYWSWIRQAPGKGLEWIGEINHSGTTRTNPSLESRVTMSVDTSKNHFSLKLRSVTAADRAFYYCARG

SEQ ID NO: 12215 - protein, 127 aa, Homo sapiens
QLQLQQWGAGLLKPSETLSLTCSVHGGSFSGYYWSWIRQAPGKGLEWIGEINHSGTTRTNPSLESRVTMSVDTSKNHFSLKLRSVTAADRAFYYCARGNHYRYDFWSGSRADWLDPWGQGILVTVSP

SEQ ID NO: 12216 - protein, 99 aa, Homo sapiens
QLQLQVAGPGLVKPSETLSLTCTVSGGSITSRTYYWGWIRQPPGKGLEWIGNIYYSASTYYNPSLKSRVTISVDTSKSQISLKLSSVTAADTAVYYCVR

SEQ ID NO: 12217 - protein, 123 aa, Homo sapiens
QLQLQVAGPGLVKPSETLSLTCTVSGGSITSRTYYWGWIRQPPGKGLEWIGNIYYSASTYYNPSLKSRVTISVDTSKSQISLKLSSVTAADTAVYYCVRTTSGRYYAYYFDYWGQGTLVTVSS

SEQ ID NO: 12218 - protein, 99 aa, Homo sapiens
QLQLRESGPGLVKPSETLSLTCTVSGGSISGGDYFWAWIRQPPGKGLEWIGDITYSGTTYYNPFLQSRATISVDTSRSQFSLKLNSVTAADTAVYFCAR

SEQ ID NO: 12219 - protein, 114 aa, Homo sapiens
QLQLRESGPGLVKPSETLSLTCTVSGGSISGGDYFWAWIRQPPGKGLEWIGDITYSGTTYYNPFLQSRATISVDTSRSQFSLKLNSVTAADTAVYFCARLSGDWGQGTLVTVSS

SEQ ID NO: 12220 - protein, 99 aa, Homo sapiens
QLQLRESGPGLVKPSETLSLTCTVSGGSSISGSYYWGWIRQPPGKGLEWIGSMYYTGYTYLNPSLKSRVTISVDTSKNQVSLRVSSVTAADTAVYYCAR

SEQ ID NO: 12221 - protein, 120 aa, Homo sapiens
QLQLRESGPGLVKPSETLSLTCTVSGGSSISGSYYWGWIRQPPGKGLEWIGSMYYTGYTYLNPSLKSRVTISVDTSKNQVSLRVSSVTAADTAVYYCARRAGSSGTFYYWGQGTLVTVSS

SEQ ID NO: 12222 - protein, 99 aa, Homo sapiens
QLQLRESGPGLVKPSETLSLTCTVSGGSSISGTYYWGWIRQPPGKGLEWIGSMYYTGYTYFNPSLKSRVTISVDTSRNQVSLKMSSVTAADTAVYYCAR

SEQ ID NO: 12223 - protein, 120 aa, Homo sapiens
QLQLRESGPGLVKPSETLSLTCTVSGGSSISGTYYWGWIRQPPGKGLEWIGSMYYTGYTYFNPSLKSRVTISVDTSRNQVSLKMSSVTAADTAVYYCARRAGSSGNFYYWGQGTLVTVSS

SEQ ID NO: 12224 - protein, 99 aa, Homo sapiens
QLQLRESGPGLVRPSETLSLTCSVSGGSIRGRSTYWGWIRQPPGKGLECIGSTFHSGTTYYNPSLKSRVTISVDTSKNQFSLNLRSVTAADTAVYYCAR

SEQ ID NO: 12225 - protein, 128 aa, Homo sapiens
QLQLRESGPGLVRPSETLSLTCSVSGGSIRGRSTYWGWIRQPPGKGLECIGSTFHSGTTYYNPSLKSRVTISVDTSKNQFSLNLRSVTAADTAVYYCARIYAEKLYNWESEGAAFDVWGQGTLVTVSS

SEQ ID NO: 12226 - protein, 99 aa, Homo sapiens
QLQLRESGPGLVRPSETLSLTCSVSGGSISGPNSYWVWVRQPPGKGLESVGSTFHTGTTYYKPSLKSRLTISVDTSKNQFSLILRSVTAADTAVYYCAR

SEQ ID NO: 12227 - protein, 128 aa, Homo sapiens
QLQLRESGPGLVRPSETLSLTCSVSGGSISGPNSYWVWVRQPPGKGLESVGSTFHTGTTYYKPSLKSRLTISVDTSKNQFSLILRSVTAADTAVYYCARIYVEKLYNWESEGAAFDFWGQGTLVTVSS

SEQ ID NO: 12228 - protein, 99 aa, Homo sapiens
QLQLRVAGPGLVKPSETLSLTCTVSGGSITSRSHYWGWIRQSPGKGLEWIGNIFYSANTNYNPSLKSRVTISSDTSKSQISMRLTSVTAADTAVYYCVR

SEQ ID NO: 12229 - protein, 123 aa, Homo sapiens
QLQLRVAGPGLVKPSETLSLTCTVSGGSITSRSHYWGWIRQSPGKGLEWIGNIFYSANTNYNPSLKSRVTISSDTSKSQISMRLTSVTAADTAVYYCVRTTSGRYNAYYFDYWGQGTLVTVSS

SEQ ID NO: 12230 - protein, 98 aa, Homo sapiens
QLQLVESGGGVVQPGRSLRLSCVASGFTFSNHGMHWVRQAPGKGLEWVAVISYDGNNRYYAESAKGRFTISRDNSKDTLYLQMNSLRAEDTALYHCAK

SEQ ID NO: 12231 - protein, 128 aa, Homo sapiens
QLQLVESGGGVVQPGRSLRLSCVASGFTFSNHGMHWVRQAPGKGLEWVAVISYDGNNRYYAESAKGRFTISRDNSKDTLYLQMNSLRAEDTALYHCAKDRVTRLLRYFDYIGDAFDMWGPGTKVTVSS

SEQ ID NO: 12232 - protein, 99 aa, Homo sapiens
QLQVEESGPGLVKPSETLSLTCTVSGASISSRSYYWGWIRQPPGKGLELIGNIYYSGTTYYTPSLKSRITIFVDTSKNQFFLKLNSVTAADTAMYYCAR

SEQ ID NO: 12233 - protein, 123 aa, Homo sapiens
QLQVEESGPGLVKPSETLSLTCTVSGASISSRSYYWGWIRQPPGKGLELIGNIYYSGTTYYTPSLKSRITIFVDTSKNQFFLKLNSVTAADTAMYYCARWVSGTYYSVGFDSWGQGTLVIVSS

SEQ ID NO: 12234 - protein, 99 aa, Homo sapiens
QLRLQESGPGLVKPSETLSLTCTISGDSIISNIYYWGWIRQPPGKGLEWIGSMFSSGSSYYKPSLKSRVAMSIDSSKNQFSLKLSSVTAADTAMYYCGR

SEQ ID NO: 12235 - protein, 127 aa, Homo sapiens
QLRLQESGPGLVKPSETLSLTCTISGDSIISNIYYWGWIRQPPGKGLEWIGSMFSSGSSYYKPSLKSRVAMSIDSSKNQFSLKLSSVTAADTAMYYCGRQTRDPPYCSDGNCPINEWGQGMLVTVSS

SEQ ID NO: 12236 - protein, 9 aa, Homo sapiens
QLRYNWFDT

SEQ ID NO: 12237 - protein, 95 aa, Homo sapiens
QLVESGGALVQPGQSLRLSCAASGITLSSYNMNWVRQAPGEGLEWLSYISSSSDKIYYADSVKGRFTISRDNAKSSLYLQLNSLRADDTAVYYCA

SEQ ID NO: 12238 - protein, 117 aa, Homo sapiens
QLVESGGALVQPGQSLRLSCAASGITLSSYNMNWVRQAPGEGLEWLSYISSSSDKIYYADSVKGRFTISRDNAKSSLYLQLNSLRADDTAVYYCATDNWYDGDLDYWGRGTLVTVSS

SEQ ID NO: 12239 - protein, 96 aa, Homo sapiens
QLVESGGGLVQPGGSLRLSCAASGFTFSNYEMNWVRQAPGKGLELVSYISSSGYTIYYADSVKGRFTISRDNAKNSLYLQMNSLRVEDTAVYYCAR

SEQ ID NO: 12240 - protein, 114 aa, Homo sapiens
QLVESGGGLVQPGGSLRLSCAASGFTFSNYEMNWVRQAPGKGLELVSYISSSGYTIYYADSVKGRFTISRDNAKNSLYLQMNSLRVEDTAVYYCARGETFYDYWGQGTLVTVSS

SEQ ID NO: 12241 - protein, 96 aa, Homo sapiens
QLVESGGGLVQPGGSLRLSCAASGFTFSTYWMTWVRQAPGKSLEWVANIDQDGSEKNYVESLKGRFTISRDNAKNLLYLQMSSLRGEDTAVYYCVR

SEQ ID NO: 12242 - protein, 116 aa, Homo sapiens
QLVESGGGLVQPGGSLRLSCAASGFTFSTYWMTWVRQAPGKSLEWVANIDQDGSEKNYVESLKGRFTISRDNAKNLLYLQMSSLRGEDTAVYYCVRGGGNSWGGYWGQGTLVTVSS

SEQ ID NO: 12243 - protein, 95 aa, Homo sapiens
QLVESGGGLVQPGGSLRLSCAASGFTVSSKYMSWVRQAPGKGLEWVSVIYSGDITYYSNSVRGRFTISRDNSRNTLYLQMNSLRAEDTAVYYCAR

SEQ ID NO: 12244 - protein, 117 aa, Homo sapiens
QLVESGGGLVQPGGSLRLSCAASGFTVSSKYMSWVRQAPGKGLEWVSVIYSGDITYYSNSVRGRFTISRDNSRNTLYLQMNSLRAEDTAVYYCARGTDSAATRVDAWGQGTTVTVSS

SEQ ID NO: 12245 - protein, 96 aa, Homo sapiens
QLVESGGGLVQPGGSLRLSCIASGFIFRDHWMTWVRQAPGKGLEWVANIKEDGSERNYVDSVKGRLTISRDNAKNSLFLQMDNLRVEDTAVYYCTR

SEQ ID NO: 12246 - protein, 119 aa, Homo sapiens
QLVESGGGLVQPGGSLRLSCIASGFIFRDHWMTWVRQAPGKGLEWVANIKEDGSERNYVDSVKGRLTISRDNAKNSLFLQMDNLRVEDTAVYYCTRLQVETGYRPCQDWGQGTLVTVSS

SEQ ID NO: 12247 - protein, 99 aa, Homo sapiens
QLVLTQAPSASASLGASVKLTCTLDSGHSSYAIAWHQQRPEKGPRYLMTLNSDGSHIKGDGIPDRFSGSSSGAERYLTISSLQSEDEADYYCQTWGSGI

SEQ ID NO: 12248 - protein, 111 aa, Homo sapiens
QLVLTQAPSASASLGASVKLTCTLDSGHSSYAIAWHQQRPEKGPRYLMTLNSDGSHIKGDGIPDRFSGSSSGAERYLTISSLQSEDEADYYCQTWGSGIAVFGGGTQLTVL

SEQ ID NO: 12249 - protein, 97 aa, Homo sapiens
QLVLTQPPSASGTPGQRVTISCSGSSSNIGSNTVNWYQQLPGTAPQLLIYSNNQRPSGVPDRFSGSKSDTSASLAISGLLSEDEADYYCVAWDDRLN

SEQ ID NO: 12250 - protein, 110 aa, Homo sapiens
QLVLTQPPSASGTPGQRVTISCSGSSSNIGSNTVNWYQQLPGTAPQLLIYSNNQRPSGVPDRFSGSKSDTSASLAISGLLSEDEADYYCVAWDDRLNVWVFGGGTQLTVL

SEQ ID NO: 12251 - protein, 98 aa, Homo sapiens
QLVLTQSPSASASLGASVKLTCTLSSGHSDYAIAWHQQRPEMGPRYLMKVSSDGTHNKGDGIPDRFSGSSSGAERYLTISSLQSEDEADYYCQTWVTG

SEQ ID NO: 12252 - protein, 111 aa, Homo sapiens
QLVLTQSPSASASLGASVKLTCTLSSGHSDYAIAWHQQRPEMGPRYLMKVSSDGTHNKGDGIPDRFSGSSSGAERYLTISSLQSEDEADYYCQTWVTGHYVFGTGTKVTVL

SEQ ID NO: 12253 - protein, 97 aa, Homo sapiens
QLVLTQSPSASASLGASVKLTCTLSSGHSNYAIAWHQQQPEKGPRYLMKLNSDGSHFKGDGIPDRFSGSSSGAERYLTISNLQSEDEADYYCQTWGT

SEQ ID NO: 12254 - protein, 111 aa, Homo sapiens
QLVLTQSPSASASLGASVKLTCTLSSGHSNYAIAWHQQQPEKGPRYLMKLNSDGSHFKGDGIPDRFSGSSSGAERYLTISNLQSEDEADYYCQTWGTDSYVFGTGTKVTVL

SEQ ID NO: 12255 - protein, 99 aa, Homo sapiens
QLVLTQSPSASASLGASVKLTCTLSSGHSRYAIAWHQQRPEKGPRYLMNLNSDGSHSKGDGIPDRFSGSSSGAERYLTISSLQSEDEADYYCQTWGTGI

SEQ ID NO: 12256 - protein, 111 aa, Homo sapiens
QLVLTQSPSASASLGASVKLTCTLSSGHSRYAIAWHQQRPEKGPRYLMNLNSDGSHSKGDGIPDRFSGSSSGAERYLTISSLQSEDEADYYCQTWGTGIQVFGGGTKLTVL

SEQ ID NO: 12257 - protein, 99 aa, Homo sapiens
QLVLTQSPSASASLGASVKLTCTLSSGHSSSAIAWHQQQPEKGPRYLMKVNNDGSHSKGDGIPNRFSGSSSGTERYLTISSLQSEDEAVYYCQTWGTGI

SEQ ID NO: 12258 - protein, 112 aa, Homo sapiens
QLVLTQSPSASASLGASVKLTCTLSSGHSSSAIAWHQQQPEKGPRYLMKVNNDGSHSKGDGIPNRFSGSSSGTERYLTISSLQSEDEAVYYCQTWGTGIQVVFGGGTKLTVL

SEQ ID NO: 12259 - protein, 98 aa, Homo sapiens
QLVLTQSPSASASLGASVKLTCTLSSGHSSYAIAWHQQQPEKGPRYLMKLNSDGSHSKGDGIPDRFSGSSSGAERYLTISSLQSEDEADYYCQTWGTG

SEQ ID NO: 12260 - protein, 99 aa, Homo sapiens
QLVLTQSPSASASLGASVKLTCTLSSGHSSYAIAWHQQQPEKGPRYLMKLNSDGSHSKGDGIPDRFSGSSSGAERYLTISSLQSEDEADYYCQTWGTGF

SEQ ID NO: 12261 - protein, 111 aa, Homo sapiens
QLVLTQSPSASASLGASVKLTCTLSSGHSSYAIAWHQQQPEKGPRYLMKLNSDGSHSKGDGIPDRFSGSSSGAERYLTISSLQSEDEADYYCQTWGTGFWVFGGGTKLTVL

SEQ ID NO: 12262 - protein, 113 aa, Homo sapiens
QLVLTQSPSASASLGASVKLTCTLSSGHSSYAIAWHQQQPEKGPRYLMKLNSDGSHSKGDGIPDRFSGSSSGAERYLTISSLQSEDEADYYCQTWGTGIPLAVFGGGTQLTVL

SEQ ID NO: 12263 - protein, 98 aa, Homo sapiens
QLVLTQSPSASASLGASVKLTCTLSSGHSSYAIAWHQQQPEKGPRYLMRLNGDGSHSNGDGIPDRFSGSSSGAERYLTISSLQSEDEADYYCQTWGTG

SEQ ID NO: 12264 - protein, 111 aa, Homo sapiens
QLVLTQSPSASASLGASVKLTCTLSSGHSSYAIAWHQQQPEKGPRYLMRLNGDGSHSNGDGIPDRFSGSSSGAERYLTISSLQSEDEADYYCQTWGTGTVVFGGGTKLTVL

SEQ ID NO: 12265 - protein, 99 aa, Homo sapiens
QLVLTQSPSASASLGASVKLTCTLSSGHSSYGIAWHQQQPEKGPRYLMKLNSDGSHSKGDGIPDRFSGSSSGTERYLIISRLQSEDEADYYCQTWGTGI

SEQ ID NO: 12266 - protein, 114 aa, Homo sapiens
QLVLTQSPSASASLGASVKLTCTLSSGHSSYGIAWHQQQPEKGPRYLMKLNSDGSHSKGDGIPDRFSGSSSGTERYLIISRLQSEDEADYYCQTWGTGIHASWVFGGGTKLTVL

SEQ ID NO: 12267 - protein, 98 aa, Homo sapiens
QLVLTQSPSASASLGASVKVTCTLSSGHINYAIAWHQHQPEKGPRYLMKLNSDGSHTKGDGIPDRFSGSSSGAERYLIISSLQAEDEGDYYCQTWGTG

SEQ ID NO: 12268 - protein, 111 aa, Homo sapiens
QLVLTQSPSASASLGASVKVTCTLSSGHINYAIAWHQHQPEKGPRYLMKLNSDGSHTKGDGIPDRFSGSSSGAERYLIISSLQAEDEGDYYCQTWGTGMYVFGAGTKVTVL

SEQ ID NO: 12269 - protein, 99 aa, Homo sapiens
QLVLTQSPSASASLGASVRLSCSLTSGHTNYGIAWHQQQPEKGPRYLMKINSDGSHTKDDGIPDRFSGSTSGTDYYLTISNLQSEDEADYYCQTWGGGI

SEQ ID NO: 12270 - protein, 112 aa, Homo sapiens
QLVLTQSPSASASLGASVRLSCSLTSGHTNYGIAWHQQQPEKGPRYLMKINSDGSHTKDDGIPDRFSGSTSGTDYYLTISNLQSEDEADYYCQTWGGGIQGVFGGGTKLAVL

SEQ ID NO: 12271 - protein, 96 aa, Homo sapiens
QLVQSGAEVKKPGSSVKVSCKASGGSFSSYIINWVRQAPGQGLEWMGGITPALGSADHAAKLQGRLTMTADTSTNIAYMELSSLTSGDTAVYYCAR

SEQ ID NO: 12272 - protein, 123 aa, Homo sapiens
QLVQSGAEVKKPGSSVKVSCKASGGSFSSYIINWVRQAPGQGLEWMGGITPALGSADHAAKLQGRLTMTADTSTNIAYMELSSLTSGDTAVYYCARERRRFLDGGGYYGMDLWGQGTTVIVSS

SEQ ID NO: 12273 - protein, 99 aa, Homo sapiens
QLVVTQSPSASASLGASVKLTCTLNSGHSNYGIAWHQQQPEKGPRYLMKVNSDGSYTKGDGIPDRFSGSSSGTERYLTISSLQSEDEADYYCQAWDTGI

SEQ ID NO: 12274 - protein, 111 aa, Homo sapiens
QLVVTQSPSASASLGASVKLTCTLNSGHSNYGIAWHQQQPEKGPRYLMKVNSDGSYTKGDGIPDRFSGSSSGTERYLTISSLQSEDEADYYCQAWDTGIRVFGGGTKLTVL

SEQ ID NO: 12275 - protein, 99 aa, Homo sapiens
QLVVTQSPSASASLGASVKLTCTLSSGHSNSAIAWHQQQPEKGPRYLMKINSDGSHTKGDGIPDRFSGSSSGAARYLTISSLQSEDEADYYCQTWDTGI

SEQ ID NO: 12276 - protein, 111 aa, Homo sapiens
QLVVTQSPSASASLGASVKLTCTLSSGHSNSAIAWHQQQPEKGPRYLMKINSDGSHTKGDGIPDRFSGSSSGAARYLTISSLQSEDEADYYCQTWDTGIRVFGGGTKLTVL

SEQ ID NO: 12277 - protein, 10 aa, Homo sapiens
QLYGASPGRT

SEQ ID NO: 12278 - protein, 8 aa, Homo sapiens
QLYGGFLT

SEQ ID NO: 12279 - protein, 10 aa, Homo sapiens
QLYGRSPPYT

SEQ ID NO: 12280 - protein, 99 aa, Homo sapiens
QMQLHESGPGLVKPSETLSLTCSVSGGSISSSTYYWGWIRQSPGKGLEWIGHIDYRGWTDYNPSLKNRVTLFVDTSKNQFSLKMNSVTAADTAVFYCAR

SEQ ID NO: 12281 - protein, 126 aa, Homo sapiens
QMQLHESGPGLVKPSETLSLTCSVSGGSISSSTYYWGWIRQSPGKGLEWIGHIDYRGWTDYNPSLKNRVTLFVDTSKNQFSLKMNSVTAADTAVFYCARLVKRLSLNIVLYAFDFWGQGTLVTVSS

SEQ ID NO: 12282 - protein, 99 aa, Homo sapiens
QMQLQESGPGLVKPSETLSLTCTVTGGSVSGSNYYWGWIRQPPGKGLEWIGSIHYSGSTYYNPSLKSRVTMSLDTSRNQVSLKVTSVTAADTAVYYCAR

SEQ ID NO: 12283 - protein, 125 aa, Homo sapiens
QMQLQESGPGLVKPSETLSLTCTVTGGSVSGSNYYWGWIRQPPGKGLEWIGSIHYSGSTYYNPSLKSRVTMSLDTSRNQVSLKVTSVTAADTAVYYCARPGRGSMLTAYWYFDLWGRGTLVTVSS

SEQ ID NO: 12284 - protein, 99 aa, Homo sapiens
QMQLQESGPGLVKPSGTLSLTCTVSGGSISSNSVYWGWVRQPPGKGLEWIATIYYNGNTYYNPSLKSRVTISVDTSKNLFSLKLTSVTAADTAVYYCAR

SEQ ID NO: 12285 - protein, 130 aa, Homo sapiens
QMQLQESGPGLVKPSGTLSLTCTVSGGSISSNSVYWGWVRQPPGKGLEWIATIYYNGNTYYNPSLKSRVTISVDTSKNLFSLKLTSVTAADTAVYYCARHAATIFGLLRPPDYYFCMDLWGEGTTVTVSS

SEQ ID NO: 12286 - protein, 99 aa, Homo sapiens
QMQLQESGPGLVKPSQTLSLNCTVSGGSIDSDDYYWSWIRQFPGKGLEWIGYIYYSGRTDYNPSLKSRVTISIDTSENLFSLRMSSVTAADTAVFFCAR

SEQ ID NO: 12287 - protein, 127 aa, Homo sapiens
QMQLQESGPGLVKPSQTLSLNCTVSGGSIDSDDYYWSWIRQFPGKGLEWIGYIYYSGRTDYNPSLKSRVTISIDTSENLFSLRMSSVTAADTAVFFCARERRFGRLTLSRADAFDVWGQGTMVTVSS

SEQ ID NO: 12288 - protein, 99 aa, Homo sapiens
QMQLQESGPGLVRPSQTLSVTCTVSSGSISDISFFWAWIRQPPGKGLEWIGSLYFGGRPHYNPSLKGRVTISVDKSKGHLSLTLTSVTAADTGVYYCAR

SEQ ID NO: 12289 - protein, 117 aa, Homo sapiens
QMQLQESGPGLVRPSQTLSVTCTVSSGSISDISFFWAWIRQPPGKGLEWIGSLYFGGRPHYNPSLKGRVTISVDKSKGHLSLTLTSVTAADTGVYYCARLAGIQGIWGQGTLVTVSS

SEQ ID NO: 12290 - protein, 98 aa, Homo sapiens
QMQLVESGGGVVQPGRSLRLSCAASGFRFSSYVLHWVRQAPGKGLEWLAVISKDGTKKVYADSVKGRFTISRDNSKDTLYLQMDSLRAEDTSFYYCAR

SEQ ID NO: 12291 - protein, 126 aa, Homo sapiens
QMQLVESGGGVVQPGRSLRLSCAASGFRFSSYVLHWVRQAPGKGLEWLAVISKDGTKKVYADSVKGRFTISRDNSKDTLYLQMDSLRAEDTSFYYCARVRSYYGSGTSYGDSYDIWGQGTMVTVSS

SEQ ID NO: 12292 - protein, 98 aa, Homo sapiens
QMQLVQSGPEVKKPGTSVKVSCKASGFTFISSAVQWVRQARGQRLEWIGWIVVGSGNTNYEQKFQERVTITRDMSTSTAYMELSSLRSEDTAVYYCAA

SEQ ID NO: 12293 - protein, 131 aa, Homo sapiens
QMQLVQSGPEVKKPGTSVKVSCKASGFTFISSAVQWVRQARGQRLEWIGWIVVGSGNTNYEQKFQERVTITRDMSTSTAYMELSSLRSEDTAVYYCAADLRGGSREYYYDSSGYYWWFDPWGQGTLVTVSS

SEQ ID NO: 12294 - protein, 99 aa, Homo sapiens
QMQPQESGPGLVKPSETLSLTCTVSGDPISSIRYFWAWIRQPPGKGLEWIGSIYYGGRTYYNPSLKSRVAIFVDKSKNQLALTLTSATAADTAVYYCAR

SEQ ID NO: 12295 - protein, 117 aa, Homo sapiens
QMQPQESGPGLVKPSETLSLTCTVSGDPISSIRYFWAWIRQPPGKGLEWIGSIYYGGRTYYNPSLKSRVAIFVDKSKNQLALTLTSATAADTAVYYCARVAGIQGIWGPGTLVSVSS

SEQ ID NO: 12296 - protein, 98 aa, Homo sapiens
QMQPQESGPGLVKTSETLSLTCTVAGGSITSISYFWAWIRQPPGRGLEWIGSIYYGGGTYYNPSLKTRVTIFVDKSRNHLSLNLTSAIAADTGVYYCA

SEQ ID NO: 12297 - protein, 117 aa, Homo sapiens
QMQPQESGPGLVKTSETLSLTCTVAGGSITSISYFWAWIRQPPGRGLEWIGSIYYGGGTYYNPSLKTRVTIFVDKSRNHLSLNLTSAIAADTGVYYCARIAGIQGIWGQGTRVTVSS

SEQ ID NO: 12298 - protein, 98 aa, Homo sapiens
QMRLVQSGPEVKNPGASLRVSCKASGFRFSDYYIHWVRRTPGQGFEWMGCINPDSGGTKFAQKFEGRVTLTRVTSITTVYMELHSLTSDDTAEYFCAR

SEQ ID NO: 12299 - protein, 128 aa, Homo sapiens
QMRLVQSGPEVKNPGASLRVSCKASGFRFSDYYIHWVRRTPGQGFEWMGCINPDSGGTKFAQKFEGRVTLTRVTSITTVYMELHSLTSDDTAEYFCARDSGDYYFNKENLPYNWFDPWGQGTLVTVSS

SEQ ID NO: 12300 - protein, 7 aa, Homo sapiens
QNDKRPS

SEQ ID NO: 12301 - protein, 7 aa, Homo sapiens
QNHAFDI

SEQ ID NO: 12302 - protein, 7 aa, Homo sapiens
QNNKRPS

SEQ ID NO: 12303 - protein, 9 aa, Homo sapiens
QNYKSVPLT

SEQ ID NO: 12304 - protein, 5 aa, Homo sapiens
QNYMS

SEQ ID NO: 12305 - protein, 11 aa, Homo sapiens
QNYNNAPRVFT

SEQ ID NO: 12306 - protein, 99 aa, Homo sapiens
QPQLQQSGPGLVKPSETLSLTCTVSGDSINNKNFLWGWIRQPPGMGLEWIASISFSGTTHYSPSLESRLTTSVDTSTRQFSLKLTSVTAADTAVYYCVR

SEQ ID NO: 12307 - protein, 126 aa, Homo sapiens
QPQLQQSGPGLVKPSETLSLTCTVSGDSINNKNFLWGWIRQPPGMGLEWIASISFSGTTHYSPSLESRLTTSVDTSTRQFSLKLTSVTAADTAVYYCVRHRSVVVKGRYGDYFDFWGRGTLVAVSS

SEQ ID NO: 12308 - protein, 20 aa, Homo sapiens
QPRGTYCSLGVCDPYYYVDV

SEQ ID NO: 12309 - protein, 104 aa, Homo sapiens
QPVLTQPPSASASLGASVSLTCTLSSGYSNYKVDWYQQRPGKGPQFVMRVGTGGIMGSKGDGIPDRYSVLGSGLNRYLTIRNIQEEDESDYYCGADHGSGSNFV

SEQ ID NO: 12310 - protein, 116 aa, Homo sapiens
QPVLTQPPSASASLGASVSLTCTLSSGYSNYKVDWYQQRPGKGPQFVMRVGTGGIMGSKGDGIPDRYSVLGSGLNRYLTIRNIQEEDESDYYCGADHGSGSNFVVVFGGGTKLTVL

SEQ ID NO: 12311 - protein, 104 aa, Homo sapiens
QPVLTQPPSASASLGASVTLTCTLSSGYSNYKVDWYQQRPGKGPRFVMRVGTGGIVGFKGDGIPDRFSGLGSGQNRYLTIKNIQEEDESDYHCGADHGTGINFV

SEQ ID NO: 12312 - protein, 116 aa, Homo sapiens
QPVLTQPPSASASLGASVTLTCTLSSGYSNYKVDWYQQRPGKGPRFVMRVGTGGIVGFKGDGIPDRFSGLGSGQNRYLTIKNIQEEDESDYHCGADHGTGINFVYVFGPGTKVTVL

SEQ ID NO: 12313 - protein, 103 aa, Homo sapiens
QPVLTQPPSASASLGASVTLTCTLSSGYSNYKVDWYQQRPGKGPRFVMRVGTGGIVGSKGDGIPDRFSVLGSGLNRYLTIKNIQEEDESDYHCGADHGSGSNF

SEQ ID NO: 12314 - protein, 116 aa, Homo sapiens
QPVLTQPPSASASLGASVTLTCTLSSGYSNYKVDWYQQRPGKGPRFVMRVGTGGIVGSKGDGIPDRFSVLGSGLNRYLTIKNIQEEDESDYHCGADHGSGSNFLVVFGGGTKLTVL

SEQ ID NO: 12315 - protein, 104 aa, Homo sapiens
QPVLTQPPSASASLGASVTLTCTLSSGYSNYKVDWYQQRPGKGPRFVMRVGTGGNVGAKGEGIPDRFSVLASGLNRYLTIKNVQEEDESDYHCGADYGSGSNFV

SEQ ID NO: 12316 - protein, 116 aa, Homo sapiens
QPVLTQPPSASASLGASVTLTCTLSSGYSNYKVDWYQQRPGKGPRFVMRVGTGGNVGAKGEGIPDRFSVLASGLNRYLTIKNVQEEDESDYHCGADYGSGSNFVVVFGGGTKLTVL

SEQ ID NO: 12317 - protein, 104 aa, Homo sapiens
QPVLTQPPSASASLGASVTLTCTLTSGYSNYKVDWYQQRPGKGPRFVMRVGTGGIMGSKGDGIPDRYSVLGSGLNRYLTIRNIQEEDESDYYCGADHGSGSDFV

SEQ ID NO: 12318 - protein, 116 aa, Homo sapiens
QPVLTQPPSASASLGASVTLTCTLTSGYSNYKVDWYQQRPGKGPRFVMRVGTGGIMGSKGDGIPDRYSVLGSGLNRYLTIRNIQEEDESDYYCGADHGSGSDFVVVFGGGTKLTVL

SEQ ID NO: 12319 - protein, 104 aa, Homo sapiens
QPVLTQPPSASASLGDSVTLTCTLSSDYSTYKVDWYQQRPGEGPRFVMRVDSGGIVESKGEGIPDRFSVFGSGLSRYLTINNIQEEDESDYHCGADHVTGRVFV

SEQ ID NO: 12320 - protein, 116 aa, Homo sapiens
QPVLTQPPSASASLGDSVTLTCTLSSDYSTYKVDWYQQRPGEGPRFVMRVDSGGIVESKGEGIPDRFSVFGSGLSRYLTINNIQEEDESDYHCGADHVTGRVFVYVFGGGTKLTVL

SEQ ID NO: 12321 - protein, 98 aa, Homo sapiens
QPVLTQPPSVSGTPGQRVTVTCSGSSSNIGSSSVHWYQLLPGTAPKLLISTTSQRPSGVPDRFSGSKSGTSASLAISGLQSEDESDYFCAAWDDSLNG

SEQ ID NO: 12322 - protein, 110 aa, Homo sapiens
QPVLTQPPSVSGTPGQRVTVTCSGSSSNIGSSSVHWYQLLPGTAPKLLISTTSQRPSGVPDRFSGSKSGTSASLAISGLQSEDESDYFCAAWDDSLNGWVFGGGTKLSVL

SEQ ID NO: 12323 - protein, 99 aa, Homo sapiens
QPVLTQSPSASASLGAPVKLTCTLSRGHSTYAIAWHQQQPGKGPRYLMKVNSDGSHNKGDGIPDRFSGSSSGAERYLTISTLQSEDEADYYCQTWGTGL

SEQ ID NO: 12324 - protein, 111 aa, Homo sapiens
QPVLTQSPSASASLGAPVKLTCTLSRGHSTYAIAWHQQQPGKGPRYLMKVNSDGSHNKGDGIPDRFSGSSSGAERYLTISTLQSEDEADYYCQTWGTGLYVFGIGTRVTVL

SEQ ID NO: 12325 - protein, 99 aa, Homo sapiens
QPVLTQSPSASASLGASVKLTCTLNSGHRDYVIAWHQHQPEKGPRYLMKLNPDGSHDKGDGIPDRFSGSSSGAERYLTISNLQSEDEADYYCQTWGTGI

SEQ ID NO: 12326 - protein, 111 aa, Homo sapiens
QPVLTQSPSASASLGASVKLTCTLNSGHRDYVIAWHQHQPEKGPRYLMKLNPDGSHDKGDGIPDRFSGSSSGAERYLTISNLQSEDEADYYCQTWGTGIWVFGGGTKLTVL

SEQ ID NO: 12327 - protein, 99 aa, Homo sapiens
QPVLTQSPSASASLGASVKLTCTLNSGHSDYVIAWHQQQPEKGPRYLMKLNPDGSHDKGDGIPDRFSGSSSGAERYLTISNLQSEDEADYYCQTWGTGI

SEQ ID NO: 12328 - protein, 111 aa, Homo sapiens
QPVLTQSPSASASLGASVKLTCTLNSGHSDYVIAWHQQQPEKGPRYLMKLNPDGSHDKGDGIPDRFSGSSSGAERYLTISNLQSEDEADYYCQTWGTGIWVFGGGTKVTVL

SEQ ID NO: 12329 - protein, 99 aa, Homo sapiens
QPVLTQSSSASASLGSSVKLTCTLSSGHSSYIIAWHQQQPGKAPRYLMKLEGSGSYNKGSGVPDRFSGSSSGADRYLTISNLQSEDEADYYCETWDSNT

SEQ ID NO: 12330 - protein, 112 aa, Homo sapiens
QPVLTQSSSASASLGSSVKLTCTLSSGHSSYIIAWHQQQPGKAPRYLMKLEGSGSYNKGSGVPDRFSGSSSGADRYLTISNLQSEDEADYYCETWDSNTLCVFGGGTKLTVL

SEQ ID NO: 12331 - protein, 9 aa, Homo sapiens
QPYNYYFIT

SEQ ID NO: 12332 - protein, 9 aa, Homo sapiens
QQAGSFPWT

SEQ ID NO: 12333 - protein, 9 aa, Homo sapiens
QQANRFPLS

SEQ ID NO: 12334 - protein, 10 aa, Homo sapiens
QQANSFLPLT

SEQ ID NO: 12335 - protein, 9 aa, Homo sapiens
QQANSFPFT

SEQ ID NO: 12336 - protein, 9 aa, Homo sapiens
QQANSFPPA

SEQ ID NO: 12337 - protein, 9 aa, Homo sapiens
QQANSFPPT

SEQ ID NO: 12338 - protein, 9 aa, Homo sapiens
QQANSFPWT

SEQ ID NO: 12339 - protein, 9 aa, Homo sapiens
QQANSFPYT

SEQ ID NO: 12340 - protein, 9 aa, Homo sapiens
QQCAYSPRT

SEQ ID NO: 12341 - protein, 10 aa, Homo sapiens
QQCGNWPPIT

SEQ ID NO: 12342 - protein, 9 aa, Homo sapiens
QQCGTSPRT

SEQ ID NO: 12343 - protein, 9 aa, Homo sapiens
QQCHNLPGT

SEQ ID NO: 12344 - protein, 10 aa, Homo sapiens
QQCNNLPMCT

SEQ ID NO: 12345 - protein, 9 aa, Homo sapiens
QQDNNLPYT

SEQ ID NO: 12346 - protein, 9 aa, Homo sapiens
QQDYSIPWT

SEQ ID NO: 12347 - protein, 5 aa, Homo sapiens
QQFAA

SEQ ID NO: 12348 - protein, 9 aa, Homo sapiens
QQFGRSSWT

SEQ ID NO: 12349 - protein, 10 aa, Homo sapiens
QQFGSSRIYT

SEQ ID NO: 12350 - protein, 9 aa, Homo sapiens
QQFGTSPFT

SEQ ID NO: 12351 - protein, 9 aa, Homo sapiens
QQFNDSPVT

SEQ ID NO: 12352 - protein, 8 aa, Homo sapiens
QQFNNWPT

SEQ ID NO: 12353 - protein, 11 aa, Homo sapiens
QQFNSWPPRLT

SEQ ID NO: 12354 - protein, 11 aa, Homo sapiens
QQFNSYPRALS

SEQ ID NO: 12355 - protein, 9 aa, Homo sapiens
QQFNTYPYS

SEQ ID NO: 12356 - protein, 8 aa, Homo sapiens
QQFSRYLT

SEQ ID NO: 12357 - protein, 9 aa, Homo sapiens
QQFYATPPT

SEQ ID NO: 12358 - protein, 9 aa, Homo sapiens
QQFYDYPLT

SEQ ID NO: 12359 - protein, 9 aa, Homo sapiens
QQFYSDQFT

SEQ ID NO: 12360 - protein, 9 aa, Homo sapiens
QQFYSLPLT

SEQ ID NO: 12361 - protein, 9 aa, Homo sapiens
QQFYSPPWT

SEQ ID NO: 12362 - protein, 9 aa, Homo sapiens
QQFYSYPLT

SEQ ID NO: 12363 - protein, 9 aa, Homo sapiens
QQGDSYPYT

SEQ ID NO: 12364 - protein, 9 aa, Homo sapiens
QQHGNSPRT

SEQ ID NO: 12365 - protein, 9 aa, Homo sapiens
QQHGSSSLT

SEQ ID NO: 12366 - protein, 10 aa, Homo sapiens
QQHNNWPPIT

SEQ ID NO: 12367 - protein, 10 aa, Homo sapiens
QQHNNWPPWT

SEQ ID NO: 12368 - protein, 9 aa, Homo sapiens
QQHSIWPGT

SEQ ID NO: 12369 - protein, 9 aa, Homo sapiens
QQHSNWPST

SEQ ID NO: 12370 - protein, 9 aa, Homo sapiens
QQHYDIPYT

SEQ ID NO: 12371 - protein, 9 aa, Homo sapiens
QQHYSMPLT

SEQ ID NO: 12372 - protein, 9 aa, Homo sapiens
QQHYSTPGT

SEQ ID NO: 12373 - protein, 9 aa, Homo sapiens
QQHYTTPPT

SEQ ID NO: 12374 - protein, 14 aa, Homo sapiens
QQLAPAIGGDYFDY

SEQ ID NO: 12375 - protein, 9 aa, Homo sapiens
QQLDSYTYT

SEQ ID NO: 12376 - protein, 9 aa, Homo sapiens
QQLDTNPLT

SEQ ID NO: 12377 - protein, 9 aa, Homo sapiens
QQLDTYPLT

SEQ ID NO: 12378 - protein, 9 aa, Homo sapiens
QQLHTYPII

SEQ ID NO: 12379 - protein, 9 aa, Homo sapiens
QQLIDYPLT

SEQ ID NO: 12380 - protein, 9 aa, Homo sapiens
QQLIGYPLT

SEQ ID NO: 12381 - protein, 9 aa, Homo sapiens
QQLKSYPII

SEQ ID NO: 12382 - protein, 9 aa, Homo sapiens
QQLKSYPLT

SEQ ID NO: 12383 - protein, 9 aa, Homo sapiens
QQLKSYPVT

SEQ ID NO: 12384 - protein, 9 aa, Homo sapiens
QQLNNYPLT

SEQ ID NO: 12385 - protein, 9 aa, Homo sapiens
QQLNSDPLT

SEQ ID NO: 12386 - protein, 9 aa, Homo sapiens
QQLNSSPYT

SEQ ID NO: 12387 - protein, 10 aa, Homo sapiens
QQLNSYPALT

SEQ ID NO: 12388 - protein, 9 aa, Homo sapiens
QQLNSYPGT

SEQ ID NO: 12389 - protein, 9 aa, Homo sapiens
QQLNSYPIT

SEQ ID NO: 12390 - protein, 9 aa, Homo sapiens
QQLNSYPLT

SEQ ID NO: 12391 - protein, 10 aa, Homo sapiens
QQLNSYPPLT

SEQ ID NO: 12392 - protein, 9 aa, Homo sapiens
QQLNSYPPT

SEQ ID NO: 12393 - protein, 9 aa, Homo sapiens
QQLNSYPRT

SEQ ID NO: 12394 - protein, 9 aa, Homo sapiens
QQLNSYRFT

SEQ ID NO: 12395 - protein, 9 aa, Homo sapiens
QQLQAYPIT

SEQ ID NO: 12396 - protein, 9 aa, Homo sapiens
QQLYSYPDT

SEQ ID NO: 12397 - protein, 9 aa, Homo sapiens
QQLYSYPYT

SEQ ID NO: 12398 - protein, 9 aa, Homo sapiens
QQNHILPGT

SEQ ID NO: 12399 - protein, 9 aa, Homo sapiens
QQNHNLPGT

SEQ ID NO: 12400 - protein, 9 aa, Homo sapiens
QQNYEIPLT

SEQ ID NO: 12401 - protein, 9 aa, Homo sapiens
QQNYKTPRT

SEQ ID NO: 12402 - protein, 9 aa, Homo sapiens
QQPNSFPRT

SEQ ID NO: 12403 - protein, 10 aa, Homo sapiens
QQRANWPLLS

SEQ ID NO: 12404 - protein, 10 aa, Homo sapiens
QQRANWPPLT

SEQ ID NO: 12405 - protein, 9 aa, Homo sapiens
QQRDDWPRT

SEQ ID NO: 12406 - protein, 10 aa, Homo sapiens
QQRFNWPPIT

SEQ ID NO: 12407 - protein, 14 aa, Homo sapiens
QQRFYGLGTGAFDI

SEQ ID NO: 12408 - protein, 9 aa, Homo sapiens
QQRGNWLWT

SEQ ID NO: 12409 - protein, 10 aa, Homo sapiens
QQRGNWPPLT

SEQ ID NO: 12410 - protein, 9 aa, Homo sapiens
QQRGSWLWT

SEQ ID NO: 12411 - protein, 9 aa, Homo sapiens
QQRGTWPPT

SEQ ID NO: 12412 - protein, 10 aa, Homo sapiens
QQRIKRRVLT

SEQ ID NO: 12413 - protein, 11 aa, Homo sapiens
QQRINWPPSFT

SEQ ID NO: 12414 - protein, 10 aa, Homo sapiens
QQRLYWPPVT

SEQ ID NO: 12415 - protein, 10 aa, Homo sapiens
QQRNNWPPLT

SEQ ID NO: 12416 - protein, 9 aa, Homo sapiens
QQRNSWRYT

SEQ ID NO: 12417 - protein, 10 aa, Homo sapiens
QQRRYWPPLT

SEQ ID NO: 12418 - protein, 11 aa, Homo sapiens
QQRSDWPPTWT

SEQ ID NO: 12419 - protein, 11 aa, Homo sapiens
QQRSHWPPRFT

SEQ ID NO: 12420 - protein, 8 aa, Homo sapiens
QQRSIMIT

SEQ ID NO: 12421 - protein, 10 aa, Homo sapiens
QQRSKWPGIT

SEQ ID NO: 12422 - protein, 10 aa, Homo sapiens
QQRSKWPSIT

SEQ ID NO: 12423 - protein, 8 aa, Homo sapiens
QQRSNLRT

SEQ ID NO: 12424 - protein, 8 aa, Homo sapiens
QQRSNWIT

SEQ ID NO: 12425 - protein, 9 aa, Homo sapiens
QQRSNWLLT

SEQ ID NO: 12426 - protein, 8 aa, Homo sapiens
QQRSNWLT

SEQ ID NO: 12427 - protein, 10 aa, Homo sapiens
QQRSNWPALT

SEQ ID NO: 12428 - protein, 9 aa, Homo sapiens
QQRSNWPLT

SEQ ID NO: 12429 - protein, 11 aa, Homo sapiens
QQRSNWPPEYT

SEQ ID NO: 12430 - protein, 11 aa, Homo sapiens
QQRSNWPPGGT

SEQ ID NO: 12431 - protein, 11 aa, Homo sapiens
QQRSNWPPGIT

SEQ ID NO: 12432 - protein, 11 aa, Homo sapiens
QQRSNWPPGLT

SEQ ID NO: 12433 - protein, 10 aa, Homo sapiens
QQRSNWPPIT

SEQ ID NO: 12434 - protein, 10 aa, Homo sapiens
QQRSNWPSIT

SEQ ID NO: 12435 - protein, 10 aa, Homo sapiens
QQRSNWPSLT

SEQ ID NO: 12436 - protein, 10 aa, Homo sapiens
QQRSNWSTWT

SEQ ID NO: 12437 - protein, 9 aa, Homo sapiens
QQRSNWSWT

SEQ ID NO: 12438 - protein, 8 aa, Homo sapiens
QQRSNWWT

SEQ ID NO: 12439 - protein, 8 aa, Homo sapiens
QQRSSLRT

SEQ ID NO: 12440 - protein, 10 aa, Homo sapiens
QQRSSWLSLT

SEQ ID NO: 12441 - protein, 11 aa, Homo sapiens
QQRSSWPPLIT

SEQ ID NO: 12442 - protein, 10 aa, Homo sapiens
QQRSSWPTWT

SEQ ID NO: 12443 - protein, 7 aa, Homo sapiens
QQRSSYT

SEQ ID NO: 12444 - protein, 8 aa, Homo sapiens
QQRSTWPS

SEQ ID NO: 12445 - protein, 10 aa, Homo sapiens
QQRTNWPRIT

SEQ ID NO: 12446 - protein, 11 aa, Homo sapiens
QQRTSWPLEYS

SEQ ID NO: 12447 - protein, 9 aa, Homo sapiens
QQRYDWRII

SEQ ID NO: 12448 - protein, 10 aa, Homo sapiens
QQRYNWPPIT

SEQ ID NO: 12449 - protein, 10 aa, Homo sapiens
QQRYNWPPLT

SEQ ID NO: 12450 - protein, 10 aa, Homo sapiens
QQSDNWPPLT

SEQ ID NO: 12451 - protein, 9 aa, Homo sapiens
QQSDSLSRT

SEQ ID NO: 12452 - protein, 10 aa, Homo sapiens
QQSDSTPPKT

SEQ ID NO: 12453 - protein, 9 aa, Homo sapiens
QQSFAFPIT

SEQ ID NO: 12454 - protein, 9 aa, Homo sapiens
QQSFGFPIT

SEQ ID NO: 12455 - protein, 7 aa, Homo sapiens
QQSFMYT

SEQ ID NO: 12456 - protein, 10 aa, Homo sapiens
QQSFNTPPYT

SEQ ID NO: 12457 - protein, 8 aa, Homo sapiens
QQSFSMYN

SEQ ID NO: 12458 - protein, 9 aa, Homo sapiens
QQSFSSQLS

SEQ ID NO: 12459 - protein, 9 aa, Homo sapiens
QQSGASPWT

SEQ ID NO: 12460 - protein, 9 aa, Homo sapiens
QQSGRSPYT

SEQ ID NO: 12461 - protein, 9 aa, Homo sapiens
QQSGSSPRT

SEQ ID NO: 12462 - protein, 9 aa, Homo sapiens
QQSGSSTST

SEQ ID NO: 12463 - protein, 9 aa, Homo sapiens
QQSHSFPIT

SEQ ID NO: 12464 - protein, 9 aa, Homo sapiens
QQSHSLPLT

SEQ ID NO: 12465 - protein, 10 aa, Homo sapiens
QQSHSTSPKT

SEQ ID NO: 12466 - protein, 8 aa, Homo sapiens
QQSKSYFM

SEQ ID NO: 12467 - protein, 9 aa, Homo sapiens
QQSKTLPLT

SEQ ID NO: 12468 - protein, 10 aa, Homo sapiens
QQSNNWPPLT

SEQ ID NO: 12469 - protein, 10 aa, Homo sapiens
QQSNSFPPLT

SEQ ID NO: 12470 - protein, 9 aa, Homo sapiens
QQSYDIPQT

SEQ ID NO: 12471 - protein, 9 aa, Homo sapiens
QQSYDTPNT

SEQ ID NO: 12472 - protein, 9 aa, Homo sapiens
QQSYDTPQT

SEQ ID NO: 12473 - protein, 9 aa, Homo sapiens
QQSYDTPRT

SEQ ID NO: 12474 - protein, 9 aa, Homo sapiens
QQSYDTPWT

SEQ ID NO: 12475 - protein, 10 aa, Homo sapiens
QQSYHTPPYT

SEQ ID NO: 12476 - protein, 9 aa, Homo sapiens
QQSYITLWT

SEQ ID NO: 12477 - protein, 9 aa, Homo sapiens
QQSYITPRT

SEQ ID NO: 12478 - protein, 9 aa, Homo sapiens
QQSYITPWT

SEQ ID NO: 12479 - protein, 9 aa, Homo sapiens
QQSYITPYS

SEQ ID NO: 12480 - protein, 9 aa, Homo sapiens
QQSYITPYT

SEQ ID NO: 12481 - protein, 9 aa, Homo sapiens
QQSYKTPFT

SEQ ID NO: 12482 - protein, 9 aa, Homo sapiens
QQSYNAPYT

SEQ ID NO: 12483 - protein, 9 aa, Homo sapiens
QQSYNNPVT

SEQ ID NO: 12484 - protein, 9 aa, Homo sapiens
QQSYNTPIT

SEQ ID NO: 12485 - protein, 9 aa, Homo sapiens
QQSYNTPNT

SEQ ID NO: 12486 - protein, 10 aa, Homo sapiens
QQSYNTPPKT

SEQ ID NO: 12487 - protein, 11 aa, Homo sapiens
QQSYNTPPMYT

SEQ ID NO: 12488 - protein, 9 aa, Homo sapiens
QQSYNTPQT

SEQ ID NO: 12489 - protein, 9 aa, Homo sapiens
QQSYNTPYT

SEQ ID NO: 12490 - protein, 9 aa, Homo sapiens
QQSYNVPNT

SEQ ID NO: 12491 - protein, 9 aa, Homo sapiens
QQSYNVVPT

SEQ ID NO: 12492 - protein, 9 aa, Homo sapiens
QQSYRNPVT

SEQ ID NO: 12493 - protein, 8 aa, Homo sapiens
QQSYRTPG

SEQ ID NO: 12494 - protein, 10 aa, Homo sapiens
QQSYSAPSYT

SEQ ID NO: 12495 - protein, 9 aa, Homo sapiens
QQSYSFPIT

SEQ ID NO: 12496 - protein, 9 aa, Homo sapiens
QQSYSFPTT

SEQ ID NO: 12497 - protein, 10 aa, Homo sapiens
QQSYSHPRVT

SEQ ID NO: 12498 - protein, 9 aa, Homo sapiens
QQSYSILFT

SEQ ID NO: 12499 - protein, 9 aa, Homo sapiens
QQSYSIPNT

SEQ ID NO: 12500 - protein, 9 aa, Homo sapiens
QQSYSKLWT

SEQ ID NO: 12501 - protein, 9 aa, Homo sapiens
QQSYSLLYS

SEQ ID NO: 12502 - protein, 9 aa, Homo sapiens
QQSYSNPRT

SEQ ID NO: 12503 - protein, 9 aa, Homo sapiens
QQSYSPPLT

SEQ ID NO: 12504 - protein, 8 aa, Homo sapiens
QQSYSSLT

SEQ ID NO: 12505 - protein, 9 aa, Homo sapiens
QQSYSSPFA

SEQ ID NO: 12506 - protein, 9 aa, Homo sapiens
QQSYSSPFT

SEQ ID NO: 12507 - protein, 11 aa, Homo sapiens
QQSYSSPPEPT

SEQ ID NO: 12508 - protein, 9 aa, Homo sapiens
QQSYSSPWT

SEQ ID NO: 12509 - protein, 8 aa, Homo sapiens
QQSYSTGA

SEQ ID NO: 12510 - protein, 9 aa, Homo sapiens
QQSYSTLWT

SEQ ID NO: 12511 - protein, 9 aa, Homo sapiens
QQSYSTPFT

SEQ ID NO: 12512 - protein, 9 aa, Homo sapiens
QQSYSTPKT

SEQ ID NO: 12513 - protein, 9 aa, Homo sapiens
QQSYSTPPA

SEQ ID NO: 12514 - protein, 10 aa, Homo sapiens
QQSYSTPPLT

SEQ ID NO: 12515 - protein, 9 aa, Homo sapiens
QQSYSTPPT

SEQ ID NO: 12516 - protein, 10 aa, Homo sapiens
QQSYSTPPWT

SEQ ID NO: 12517 - protein, 10 aa, Homo sapiens
QQSYSTPPYT

SEQ ID NO: 12518 - protein, 9 aa, Homo sapiens
QQSYSTPQT

SEQ ID NO: 12519 - protein, 9 aa, Homo sapiens
QQSYSTPRT

SEQ ID NO: 12520 - protein, 10 aa, Homo sapiens
QQSYSTPRVT

SEQ ID NO: 12521 - protein, 10 aa, Homo sapiens
QQSYSTPRYT

SEQ ID NO: 12522 - protein, 9 aa, Homo sapiens
QQSYSTPST

SEQ ID NO: 12523 - protein, 8 aa, Homo sapiens
QQSYSTPT

SEQ ID NO: 12524 - protein, 9 aa, Homo sapiens
QQSYSTPWT

SEQ ID NO: 12525 - protein, 17 aa, Homo sapiens
QQSYSTPYNHKYGTPYT

SEQ ID NO: 12526 - protein, 9 aa, Homo sapiens
QQSYSTQLT

SEQ ID NO: 12527 - protein, 8 aa, Homo sapiens
QQSYSTRT

SEQ ID NO: 12528 - protein, 9 aa, Homo sapiens
QQSYSTSRT

SEQ ID NO: 12529 - protein, 10 aa, Homo sapiens
QQSYTTPPFT

SEQ ID NO: 12530 - protein, 9 aa, Homo sapiens
QQSYTTPQT

SEQ ID NO: 12531 - protein, 9 aa, Homo sapiens
QQSYTTPWT

SEQ ID NO: 12532 - protein, 9 aa, Homo sapiens
QQSYTTPYT

SEQ ID NO: 12533 - protein, 9 aa, Homo sapiens
QQSYTTVLT

SEQ ID NO: 12534 - protein, 9 aa, Homo sapiens
QQSYTVVPT

SEQ ID NO: 12535 - protein, 9 aa, Homo sapiens
QQTEEAPYT

SEQ ID NO: 12536 - protein, 9 aa, Homo sapiens
QQTFSTLVT

SEQ ID NO: 12537 - protein, 9 aa, Homo sapiens
QQTGNVPYT

SEQ ID NO: 12538 - protein, 9 aa, Homo sapiens
QQTNSFPRT

SEQ ID NO: 12539 - protein, 9 aa, Homo sapiens
QQTQSLPLT

SEQ ID NO: 12540 - protein, 9 aa, Homo sapiens
QQTYDTPWT

SEQ ID NO: 12541 - protein, 9 aa, Homo sapiens
QQTYGRVLT

SEQ ID NO: 12542 - protein, 8 aa, Homo sapiens
QQTYNLCS

SEQ ID NO: 12543 - protein, 9 aa, Homo sapiens
QQTYNNPIT

SEQ ID NO: 12544 - protein, 9 aa, Homo sapiens
QQTYNTPTT

SEQ ID NO: 12545 - protein, 8 aa, Homo sapiens
QQTYSAPS

SEQ ID NO: 12546 - protein, 9 aa, Homo sapiens
QQTYSRPYS

SEQ ID NO: 12547 - protein, 9 aa, Homo sapiens
QQTYSSPPT

SEQ ID NO: 12548 - protein, 10 aa, Homo sapiens
QQTYSSRALS

SEQ ID NO: 12549 - protein, 9 aa, Homo sapiens
QQTYSTPIT

SEQ ID NO: 12550 - protein, 10 aa, Homo sapiens
QQTYTNPRVT

SEQ ID NO: 12551 - protein, 9 aa, Homo sapiens
QQTYTTPLT

SEQ ID NO: 12552 - protein, 9 aa, Homo sapiens
QQVDRYPLT

SEQ ID NO: 12553 - protein, 9 aa, Homo sapiens
QQVHSYPLT

SEQ ID NO: 12554 - protein, 9 aa, Homo sapiens
QQVNSFALT

SEQ ID NO: 12555 - protein, 9 aa, Homo sapiens
QQWINSRWT

SEQ ID NO: 12556 - protein, 9 aa, Homo sapiens
QQYANLPLT

SEQ ID NO: 12557 - protein, 9 aa, Homo sapiens
QQYANWLNS

SEQ ID NO: 12558 - protein, 8 aa, Homo sapiens
QQYASSSS

SEQ ID NO: 12559 - protein, 9 aa, Homo sapiens
QQYASSTFT

SEQ ID NO: 12560 - protein, 10 aa, Homo sapiens
QQYATSPGIT

SEQ ID NO: 12561 - protein, 9 aa, Homo sapiens
QQYATSPRA

SEQ ID NO: 12562 - protein, 10 aa, Homo sapiens
QQYDDLPPWT

SEQ ID NO: 12563 - protein, 9 aa, Homo sapiens
QQYDDLPYT

SEQ ID NO: 12564 - protein, 9 aa, Homo sapiens
QQYDGWPRL

SEQ ID NO: 12565 - protein, 9 aa, Homo sapiens
QQYDISPGT

SEQ ID NO: 12566 - protein, 8 aa, Homo sapiens
QQYDIVLT

SEQ ID NO: 12567 - protein, 9 aa, Homo sapiens
QQYDLYPYS

SEQ ID NO: 12568 - protein, 9 aa, Homo sapiens
QQYDMSPAT

SEQ ID NO: 12569 - protein, 9 aa, Homo sapiens
QQYDNFPLA

SEQ ID NO: 12570 - protein, 10 aa, Homo sapiens
QQYDNFYPYT

SEQ ID NO: 12571 - protein, 8 aa, Homo sapiens
QQYDNLIT

SEQ ID NO: 12572 - protein, 10 aa, Homo sapiens
QQYDNLLSIT

SEQ ID NO: 12573 - protein, 10 aa, Homo sapiens
QQYDNLLSLT

SEQ ID NO: 12574 - protein, 8 aa, Homo sapiens
QQYDNLPL

SEQ ID NO: 12575 - protein, 9 aa, Homo sapiens
QQYDNLPLT

SEQ ID NO: 12576 - protein, 10 aa, Homo sapiens
QQYDNLPPFT

SEQ ID NO: 12577 - protein, 9 aa, Homo sapiens
QQYDNLPPT

SEQ ID NO: 12578 - protein, 9 aa, Homo sapiens
QQYDNLPRL

SEQ ID NO: 12579 - protein, 9 aa, Homo sapiens
QQYDNLPRT

SEQ ID NO: 12580 - protein, 9 aa, Homo sapiens
QQYDNLPVT

SEQ ID NO: 12581 - protein, 9 aa, Homo sapiens
QQYDNLPYT

SEQ ID NO: 12582 - protein, 8 aa, Homo sapiens
QQYDNLST

SEQ ID NO: 12583 - protein, 9 aa, Homo sapiens
QQYDNRPLT

SEQ ID NO: 12584 - protein, 9 aa, Homo sapiens
QQYDNRPPT

SEQ ID NO: 12585 - protein, 9 aa, Homo sapiens
QQYDNSPPT

SEQ ID NO: 12586 - protein, 10 aa, Homo sapiens
QQYDNWPPIT

SEQ ID NO: 12587 - protein, 10 aa, Homo sapiens
QQYDNWPPWT

SEQ ID NO: 12588 - protein, 9 aa, Homo sapiens
QQYDNWPRT

SEQ ID NO: 12589 - protein, 9 aa, Homo sapiens
QQYDNYPPT

SEQ ID NO: 12590 - protein, 10 aa, Homo sapiens
QQYDRSSLYS

SEQ ID NO: 12591 - protein, 10 aa, Homo sapiens
QQYDRSSMYT

SEQ ID NO: 12592 - protein, 9 aa, Homo sapiens
QQYDRTPLT

SEQ ID NO: 12593 - protein, 9 aa, Homo sapiens
QQYDSFPPT

SEQ ID NO: 12594 - protein, 9 aa, Homo sapiens
QQYDSSILT

SEQ ID NO: 12595 - protein, 9 aa, Homo sapiens
QQYDSSPAT

SEQ ID NO: 12596 - protein, 9 aa, Homo sapiens
QQYDSSPFT

SEQ ID NO: 12597 - protein, 9 aa, Homo sapiens
QQYDSSPRT

SEQ ID NO: 12598 - protein, 9 aa, Homo sapiens
QQYDSSPYT

SEQ ID NO: 12599 - protein, 9 aa, Homo sapiens
QQYDSSTFT

SEQ ID NO: 12600 - protein, 8 aa, Homo sapiens
QQYDSSVT

SEQ ID NO: 12601 - protein, 9 aa, Homo sapiens
QQYDSYPYT

SEQ ID NO: 12602 - protein, 9 aa, Homo sapiens
QQYDSYSGA

SEQ ID NO: 12603 - protein, 9 aa, Homo sapiens
QQYDSYSGM

SEQ ID NO: 12604 - protein, 10 aa, Homo sapiens
QQYDTWPPWT

SEQ ID NO: 12605 - protein, 8 aa, Homo sapiens
QQYDTWSS

SEQ ID NO: 12606 - protein, 9 aa, Homo sapiens
QQYDTYSSQ

SEQ ID NO: 12607 - protein, 9 aa, Homo sapiens
QQYDVSPGT

SEQ ID NO: 12608 - protein, 9 aa, Homo sapiens
QQYDVYSRT

SEQ ID NO: 12609 - protein, 9 aa, Homo sapiens
QQYESYSWT

SEQ ID NO: 12610 - protein, 9 aa, Homo sapiens
QQYETSSLT

SEQ ID NO: 12611 - protein, 9 aa, Homo sapiens
QQYFGLPLT

SEQ ID NO: 12612 - protein, 9 aa, Homo sapiens
QQYFLTPLT

SEQ ID NO: 12613 - protein, 10 aa, Homo sapiens
QQYFNWPPLT

SEQ ID NO: 12614 - protein, 10 aa, Homo sapiens
QQYGASPMYT

SEQ ID NO: 12615 - protein, 9 aa, Homo sapiens
QQYGASPRT

SEQ ID NO: 12616 - protein, 9 aa, Homo sapiens
QQYGDSKYS

SEQ ID NO: 12617 - protein, 10 aa, Homo sapiens
QQYGDSLSLT

SEQ ID NO: 12618 - protein, 9 aa, Homo sapiens
QQYGDSPFT

SEQ ID NO: 12619 - protein, 9 aa, Homo sapiens
QQYGDSPGT

SEQ ID NO: 12620 - protein, 9 aa, Homo sapiens
QQYGDSPLT

SEQ ID NO: 12621 - protein, 9 aa, Homo sapiens
QQYGDSPRT

SEQ ID NO: 12622 - protein, 9 aa, Homo sapiens
QQYGGASRT

SEQ ID NO: 12623 - protein, 10 aa, Homo sapiens
QQYGGSPGYT

SEQ ID NO: 12624 - protein, 9 aa, Homo sapiens
QQYGGSPIT

SEQ ID NO: 12625 - protein, 9 aa, Homo sapiens
QQYGGSPLT

SEQ ID NO: 12626 - protein, 10 aa, Homo sapiens
QQYGGSPRIT

SEQ ID NO: 12627 - protein, 9 aa, Homo sapiens
QQYGGSPRT

SEQ ID NO: 12628 - protein, 9 aa, Homo sapiens
QQYGGSPST

SEQ ID NO: 12629 - protein, 9 aa, Homo sapiens
QQYGGSPYS

SEQ ID NO: 12630 - protein, 9 aa, Homo sapiens
QQYGGSSGT

SEQ ID NO: 12631 - protein, 9 aa, Homo sapiens
QQYGGSTGT

SEQ ID NO: 12632 - protein, 8 aa, Homo sapiens
QQYGIPVT

SEQ ID NO: 12633 - protein, 10 aa, Homo sapiens
QQYGNSLTWT

SEQ ID NO: 12634 - protein, 9 aa, Homo sapiens
QQYGNSLYT

SEQ ID NO: 12635 - protein, 9 aa, Homo sapiens
QQYGNSPFT

SEQ ID NO: 12636 - protein, 9 aa, Homo sapiens
QQYGNSPGT

SEQ ID NO: 12637 - protein, 9 aa, Homo sapiens
QQYGNSPLT

SEQ ID NO: 12638 - protein, 9 aa, Homo sapiens
QQYGNSPQT

SEQ ID NO: 12639 - protein, 9 aa, Homo sapiens
QQYGNSPRT

SEQ ID NO: 12640 - protein, 10 aa, Homo sapiens
QQYGNSPRVT

SEQ ID NO: 12641 - protein, 8 aa, Homo sapiens
QQYGNSPT

SEQ ID NO: 12642 - protein, 16 aa, Homo sapiens
QQYGNSPTFGQGTSPT

SEQ ID NO: 12643 - protein, 9 aa, Homo sapiens
QQYGRFPWT

SEQ ID NO: 12644 - protein, 8 aa, Homo sapiens
QQYGRSLS

SEQ ID NO: 12645 - protein, 9 aa, Homo sapiens
QQYGRSPFT

SEQ ID NO: 12646 - protein, 10 aa, Homo sapiens
QQYGRSPGLT

SEQ ID NO: 12647 - protein, 9 aa, Homo sapiens
QQYGRSPLT

SEQ ID NO: 12648 - protein, 9 aa, Homo sapiens
QQYGRSPRT

SEQ ID NO: 12649 - protein, 6 aa, Homo sapiens
QQYGRT

SEQ ID NO: 12650 - protein, 9 aa, Homo sapiens
QQYGSAQYT

SEQ ID NO: 12651 - protein, 9 aa, Homo sapiens
QQYGSFLYS

SEQ ID NO: 12652 - protein, 9 aa, Homo sapiens
QQYGSLPGT

SEQ ID NO: 12653 - protein, 7 aa, Homo sapiens
QQYGSQT

SEQ ID NO: 12654 - protein, 9 aa, Homo sapiens
QQYGSSGLT

SEQ ID NO: 12655 - protein, 9 aa, Homo sapiens
QQYGSSIFT

SEQ ID NO: 12656 - protein, 9 aa, Homo sapiens
QQYGSSILT

SEQ ID NO: 12657 - protein, 9 aa, Homo sapiens
QQYGSSLLT

SEQ ID NO: 12658 - protein, 10 aa, Homo sapiens
QQYGSSLPAT

SEQ ID NO: 12659 - protein, 10 aa, Homo sapiens
QQYGSSLTWT

SEQ ID NO: 12660 - protein, 9 aa, Homo sapiens
QQYGSSLWT

SEQ ID NO: 12661 - protein, 9 aa, Homo sapiens
QQYGSSLYT

SEQ ID NO: 12662 - protein, 9 aa, Homo sapiens
QQYGSSPCT

SEQ ID NO: 12663 - protein, 9 aa, Homo sapiens
QQYGSSPET

SEQ ID NO: 12664 - protein, 9 aa, Homo sapiens
QQYGSSPFT

SEQ ID NO: 12665 - protein, 10 aa, Homo sapiens
QQYGSSPGFT

SEQ ID NO: 12666 - protein, 9 aa, Homo sapiens
QQYGSSPGT

SEQ ID NO: 12667 - protein, 9 aa, Homo sapiens
QQYGSSPIT

SEQ ID NO: 12668 - protein, 8 aa, Homo sapiens
QQYGSSPL

SEQ ID NO: 12669 - protein, 10 aa, Homo sapiens
QQYGSSPLFT

SEQ ID NO: 12670 - protein, 9 aa, Homo sapiens
QQYGSSPLI

SEQ ID NO: 12671 - protein, 9 aa, Homo sapiens
QQYGSSPLT

SEQ ID NO: 12672 - protein, 10 aa, Homo sapiens
QQYGSSPLYT

SEQ ID NO: 12673 - protein, 11 aa, Homo sapiens
QQYGSSPPGYT

SEQ ID NO: 12674 - protein, 10 aa, Homo sapiens
QQYGSSPPIT

SEQ ID NO: 12675 - protein, 10 aa, Homo sapiens
QQYGSSPPLT

SEQ ID NO: 12676 - protein, 9 aa, Homo sapiens
QQYGSSPPT

SEQ ID NO: 12677 - protein, 10 aa, Homo sapiens
QQYGSSPPWT

SEQ ID NO: 12678 - protein, 10 aa, Homo sapiens
QQYGSSPPYT

SEQ ID NO: 12679 - protein, 10 aa, Homo sapiens
QQYGSSPQLT

SEQ ID NO: 12680 - protein, 9 aa, Homo sapiens
QQYGSSPQT

SEQ ID NO: 12681 - protein, 9 aa, Homo sapiens
QQYGSSPRA

SEQ ID NO: 12682 - protein, 10 aa, Homo sapiens
QQYGSSPRFT

SEQ ID NO: 12683 - protein, 11 aa, Homo sapiens
QQYGSSPRGLT

SEQ ID NO: 12684 - protein, 11 aa, Homo sapiens
QQYGSSPRGPT

SEQ ID NO: 12685 - protein, 9 aa, Homo sapiens
QQYGSSPRT

SEQ ID NO: 12686 - protein, 10 aa, Homo sapiens
QQYGSSPRYT

SEQ ID NO: 12687 - protein, 9 aa, Homo sapiens
QQYGSSPST

SEQ ID NO: 12688 - protein, 8 aa, Homo sapiens
QQYGSSPT

SEQ ID NO: 12689 - protein, 9 aa, Homo sapiens
QQYGSSPTT

SEQ ID NO: 12690 - protein, 9 aa, Homo sapiens
QQYGSSPVT

SEQ ID NO: 12691 - protein, 9 aa, Homo sapiens
QQYGSSPWA

SEQ ID NO: 12692 - protein, 9 aa, Homo sapiens
QQYGSSPWT

SEQ ID NO: 12693 - protein, 9 aa, Homo sapiens
QQYGSSPYT

SEQ ID NO: 12694 - protein, 9 aa, Homo sapiens
QQYGSSQYT

SEQ ID NO: 12695 - protein, 9 aa, Homo sapiens
QQYGSSRRT

SEQ ID NO: 12696 - protein, 8 aa, Homo sapiens
QQYGSSRT

SEQ ID NO: 12697 - protein, 9 aa, Homo sapiens
QQYGSSSLT

SEQ ID NO: 12698 - protein, 9 aa, Homo sapiens
QQYGSSSTT

SEQ ID NO: 12699 - protein, 9 aa, Homo sapiens
QQYGSSSVT

SEQ ID NO: 12700 - protein, 9 aa, Homo sapiens
QQYGSSTFT

SEQ ID NO: 12701 - protein, 9 aa, Homo sapiens
QQYGSSTLT

SEQ ID NO: 12702 - protein, 10 aa, Homo sapiens
QQYGSSVALT

SEQ ID NO: 12703 - protein, 8 aa, Homo sapiens
QQYGSSVT

SEQ ID NO: 12704 - protein, 9 aa, Homo sapiens
QQYGSSVWT

SEQ ID NO: 12705 - protein, 10 aa, Homo sapiens
QQYGSTPPST

SEQ ID NO: 12706 - protein, 9 aa, Homo sapiens
QQYGTLQLT

SEQ ID NO: 12707 - protein, 8 aa, Homo sapiens
QQYGTSFT

SEQ ID NO: 12708 - protein, 10 aa, Homo sapiens
QQYGTSHSFT

SEQ ID NO: 12709 - protein, 8 aa, Homo sapiens
QQYGTSKS

SEQ ID NO: 12710 - protein, 9 aa, Homo sapiens
QQYGTSPFT

SEQ ID NO: 12711 - protein, 9 aa, Homo sapiens
QQYGTSPGT

SEQ ID NO: 12712 - protein, 10 aa, Homo sapiens
QQYGTSPPYT

SEQ ID NO: 12713 - protein, 9 aa, Homo sapiens
QQYGTSPRT

SEQ ID NO: 12714 - protein, 8 aa, Homo sapiens
QQYGTSPT

SEQ ID NO: 12715 - protein, 9 aa, Homo sapiens
QQYGTSPWT

SEQ ID NO: 12716 - protein, 9 aa, Homo sapiens
QQYGTSPYT

SEQ ID NO: 12717 - protein, 9 aa, Homo sapiens
QQYGTSQNT

SEQ ID NO: 12718 - protein, 10 aa, Homo sapiens
QQYGTSSMYT

SEQ ID NO: 12719 - protein, 9 aa, Homo sapiens
QQYGTSTFT

SEQ ID NO: 12720 - protein, 8 aa, Homo sapiens
QQYGTWYT

SEQ ID NO: 12721 - protein, 9 aa, Homo sapiens
QQYGVSPGT

SEQ ID NO: 12722 - protein, 9 aa, Homo sapiens
QQYHNLPIT

SEQ ID NO: 12723 - protein, 11 aa, Homo sapiens
QQYHNWPPAYT

SEQ ID NO: 12724 - protein, 10 aa, Homo sapiens
QQYHNWPPIT

SEQ ID NO: 12725 - protein, 10 aa, Homo sapiens
QQYHNWPPLT

SEQ ID NO: 12726 - protein, 9 aa, Homo sapiens
QQYHSPPLT

SEQ ID NO: 12727 - protein, 10 aa, Homo sapiens
QQYHSWPPLT

SEQ ID NO: 12728 - protein, 9 aa, Homo sapiens
QQYHSYPIT

SEQ ID NO: 12729 - protein, 9 aa, Homo sapiens
QQYHSYPWT

SEQ ID NO: 12730 - protein, 10 aa, Homo sapiens
QQYHTFSPST

SEQ ID NO: 12731 - protein, 10 aa, Homo sapiens
QQYHTWPPWT

SEQ ID NO: 12732 - protein, 9 aa, Homo sapiens
QQYISYPLT

SEQ ID NO: 12733 - protein, 10 aa, Homo sapiens
QQYKNWPSYS

SEQ ID NO: 12734 - protein, 9 aa, Homo sapiens
QQYKNYPYT

SEQ ID NO: 12735 - protein, 9 aa, Homo sapiens
QQYKSYPLT

SEQ ID NO: 12736 - protein, 10 aa, Homo sapiens
QQYKSYSFLS

SEQ ID NO: 12737 - protein, 9 aa, Homo sapiens
QQYKSYSPT

SEQ ID NO: 12738 - protein, 10 aa, Homo sapiens
QQYKSYSQWT

SEQ ID NO: 12739 - protein, 10 aa, Homo sapiens
QQYKSYSSWT

SEQ ID NO: 12740 - protein, 9 aa, Homo sapiens
QQYKSYSYT

SEQ ID NO: 12741 - protein, 9 aa, Homo sapiens
QQYKTNPYT

SEQ ID NO: 12742 - protein, 9 aa, Homo sapiens
QQYKTYPWT

SEQ ID NO: 12743 - protein, 10 aa, Homo sapiens
QQYLNWPPIT

SEQ ID NO: 12744 - protein, 9 aa, Homo sapiens
QQYNDWLLT

SEQ ID NO: 12745 - protein, 9 aa, Homo sapiens
QQYNDWPKT

SEQ ID NO: 12746 - protein, 10 aa, Homo sapiens
QQYNDWPPLT

SEQ ID NO: 12747 - protein, 10 aa, Homo sapiens
QQYNDWPPWT

SEQ ID NO: 12748 - protein, 9 aa, Homo sapiens
QQYNDWPRG

SEQ ID NO: 12749 - protein, 9 aa, Homo sapiens
QQYNDWPRT

SEQ ID NO: 12750 - protein, 9 aa, Homo sapiens
QQYNDWPYT

SEQ ID NO: 12751 - protein, 10 aa, Homo sapiens
QQYNEWTPLT

SEQ ID NO: 12752 - protein, 9 aa, Homo sapiens
QQYNGYSLT

SEQ ID NO: 12753 - protein, 10 aa, Homo sapiens
QQYNHWPPLT

SEQ ID NO: 12754 - protein, 9 aa, Homo sapiens
QQYNHWPRM

SEQ ID NO: 12755 - protein, 10 aa, Homo sapiens
QQYNIWPPLT

SEQ ID NO: 12756 - protein, 9 aa, Homo sapiens
QQYNIWPRM

SEQ ID NO: 12757 - protein, 14 aa, Homo sapiens
QQYNKQDNKWPLIT

SEQ ID NO: 12758 - protein, 9 aa, Homo sapiens
QQYNKWPLT

SEQ ID NO: 12759 - protein, 9 aa, Homo sapiens
QQYNMWPWT

SEQ ID NO: 12760 - protein, 8 aa, Homo sapiens
QQYNNWLT

SEQ ID NO: 12761 - protein, 8 aa, Homo sapiens
QQYNNWPC

SEQ ID NO: 12762 - protein, 8 aa, Homo sapiens
QQYNNWPF

SEQ ID NO: 12763 - protein, 8 aa, Homo sapiens
QQYNNWPG

SEQ ID NO: 12764 - protein, 9 aa, Homo sapiens
QQYNNWPGD

SEQ ID NO: 12765 - protein, 9 aa, Homo sapiens
QQYNNWPIT

SEQ ID NO: 12766 - protein, 8 aa, Homo sapiens
QQYNNWPL

SEQ ID NO: 12767 - protein, 9 aa, Homo sapiens
QQYNNWPLT

SEQ ID NO: 12768 - protein, 10 aa, Homo sapiens
QQYNNWPMYT

SEQ ID NO: 12769 - protein, 10 aa, Homo sapiens
QQYNNWPPAT

SEQ ID NO: 12770 - protein, 10 aa, Homo sapiens
QQYNNWPPDT

SEQ ID NO: 12771 - protein, 12 aa, Homo sapiens
QQYNNWPPGEDT

SEQ ID NO: 12772 - protein, 10 aa, Homo sapiens
QQYNNWPPIT

SEQ ID NO: 12773 - protein, 11 aa, Homo sapiens
QQYNNWPPKLT

SEQ ID NO: 12774 - protein, 10 aa, Homo sapiens
QQYNNWPPKT

SEQ ID NO: 12775 - protein, 10 aa, Homo sapiens
QQYNNWPPLT

SEQ ID NO: 12776 - protein, 11 aa, Homo sapiens
QQYNNWPPRLT

SEQ ID NO: 12777 - protein, 9 aa, Homo sapiens
QQYNNWPPT

SEQ ID NO: 12778 - protein, 10 aa, Homo sapiens
QQYNNWPPVT

SEQ ID NO: 12779 - protein, 10 aa, Homo sapiens
QQYNNWPPWS

SEQ ID NO: 12780 - protein, 10 aa, Homo sapiens [sequence omitted]

SEQ ID NO: 12781 - protein, 10 aa, Homo sapiens
QQYNNWPPYS

SEQ ID NO: 12782 - protein, 10 aa, Homo sapiens
QQYNNWPPYT

SEQ ID NO: 12783 - protein, 9 aa, Homo sapiens
QQYNNWPQT

SEQ ID NO: 12784 - protein, 10 aa, Homo sapiens
QQYNNWPQWT

SEQ ID NO: 12785 - protein, 11 aa, Homo sapiens
QQYNNWPRALT

SEQ ID NO: 12786 - protein, 9 aa, Homo sapiens
QQYNNWPRM

SEQ ID NO: 12787 - protein, 9 aa, Homo sapiens
QQYNNWPRT

SEQ ID NO: 12788 - protein, 9 aa, Homo sapiens
QQYNNWPRV

SEQ ID NO: 12789 - protein, 10 aa, Homo sapiens
QQYNNWPRWT

SEQ ID NO: 12790 - protein, 10 aa, Homo sapiens
QQYNNWPRYT

SEQ ID NO: 12791 - protein, 8 aa, Homo sapiens
QQYNNWPS

SEQ ID NO: 12792 - protein, 10 aa, Homo sapiens
QQYNNWPSAT

SEQ ID NO: 12793 - protein, 10 aa, Homo sapiens
QQYNNWPSYS

SEQ ID NO: 12794 - protein, 8 aa, Homo sapiens
QQYNNWPT

SEQ ID NO: 12795 - protein, 8 aa, Homo sapiens
QQYNNWPV

SEQ ID NO: 12796 - protein, 9 aa, Homo sapiens
QQYNNWPWT

SEQ ID NO: 12797 - protein, 8 aa, Homo sapiens
QQYNNWQT

SEQ ID NO: 12798 - protein, 10 aa, Homo sapiens
QQYNNWSALT

SEQ ID NO: 12799 - protein, 9 aa, Homo sapiens
QQYNNWWYT

SEQ ID NO: 12800 - protein, 9 aa, Homo sapiens
QQYNNYFFT

SEQ ID NO: 12801 - protein, 9 aa, Homo sapiens
QQYNNYPPT

SEQ ID NO: 12802 - protein, 9 aa, Homo sapiens
QQYNNYPWT

SEQ ID NO: 12803 - protein, 9 aa, Homo sapiens
QQYNRYPLT

SEQ ID NO: 12804 - protein, 10 aa, Homo sapiens
QQYNSFLTYT

SEQ ID NO: 12805 - protein, 9 aa, Homo sapiens
QQYNSFPYT

SEQ ID NO: 12806 - protein, 10 aa, Homo sapiens
QQYNSFSGYT

SEQ ID NO: 12807 - protein, 8 aa, Homo sapiens
QQYNSLST

SEQ ID NO: 12808 - protein, 9 aa, Homo sapiens
QQYNSNFLT

SEQ ID NO: 12809 - protein, 9 aa, Homo sapiens
QQYNSPTWT

SEQ ID NO: 12810 - protein, 9 aa, Homo sapiens
QQYNSQWCT

SEQ ID NO: 12811 - protein, 9 aa, Homo sapiens
QQYNSSPYT

SEQ ID NO: 12812 - protein, 10 aa, Homo sapiens
QQYNSVLGAT

SEQ ID NO: 12813 - protein, 9 aa, Homo sapiens
QQYNSWLIT

SEQ ID NO: 12814 - protein, 11 aa, Homo sapiens
QQYNSWPPMYT

SEQ ID NO: 12815 - protein, 9 aa, Homo sapiens
QQYNSWPRT

SEQ ID NO: 12816 - protein, 10 aa, Homo sapiens
QQYNSYASYT

SEQ ID NO: 12817 - protein, 9 aa, Homo sapiens
QQYNSYFAT

SEQ ID NO: 12818 - protein, 9 aa, Homo sapiens
QQYNSYFYT

SEQ ID NO: 12819 - protein, 9 aa, Homo sapiens
QQYNSYLFT

SEQ ID NO: 12820 - protein, 9 aa, Homo sapiens
QQYNSYLGT

SEQ ID NO: 12821 - protein, 9 aa, Homo sapiens
QQYNSYLIT

SEQ ID NO: 12822 - protein, 9 aa, Homo sapiens
QQYNSYLLT

SEQ ID NO: 12823 - protein, 10 aa, Homo sapiens
QQYNSYLPWT

SEQ ID NO: 12824 - protein, 9 aa, Homo sapiens
QQYNSYLVT

SEQ ID NO: 12825 - protein, 9 aa, Homo sapiens
QQYNSYLYT

SEQ ID NO: 12826 - protein, 9 aa, Homo sapiens
QQYNSYPLT

SEQ ID NO: 12827 - protein, 9 aa, Homo sapiens
QQYNSYPQT

SEQ ID NO: 12828 - protein, 9 aa, Homo sapiens
QQYNSYPRT

SEQ ID NO: 12829 - protein, 8 aa, Homo sapiens
QQYNSYPT

SEQ ID NO: 12830 - protein, 9 aa, Homo sapiens
QQYNSYPVT

SEQ ID NO: 12831 - protein, 9 aa, Homo sapiens
QQYNSYPWT

SEQ ID NO: 12832 - protein, 9 aa, Homo sapiens
QQYNSYPYS

SEQ ID NO: 12833 - protein, 9 aa, Homo sapiens
QQYNSYPYT

SEQ ID NO: 12834 - protein, 10 aa, Homo sapiens
QQYNSYRMYT

SEQ ID NO: 12835 - protein, 9 aa, Homo sapiens
QQYNSYSGT

SEQ ID NO: 12836 - protein, 9 aa, Homo sapiens
QQYNSYSIT

SEQ ID NO: 12837 - protein, 10 aa, Homo sapiens
QQYNSYSLWT

SEQ ID NO: 12838 - protein, 9 aa, Homo sapiens
QQYNSYSPT

SEQ ID NO: 12839 - protein, 10 aa, Homo sapiens
QQYNSYSPWT

SEQ ID NO: 12840 - protein, 10 aa, Homo sapiens
QQYNSYSPYT

SEQ ID NO: 12841 - protein, 11 aa, Homo sapiens
QQYNSYSSPLT

SEQ ID NO: 12842 - protein, 10 aa, Homo sapiens
QQYNSYSSYT

SEQ ID NO: 12843 - protein, 10 aa, Homo sapiens
QQYNSYSSYT

SEQ ID NO: 12844 - protein, 8 aa, Homo sapiens
QQYNSYST

SEQ ID NO: 12845 - protein, 9 aa, Homo sapiens
QQYNSYSWT

SEQ ID NO: 12846 - protein, 9 aa, Homo sapiens
QQYNSYSYT

SEQ ID NO: 12847 - protein, 9 aa, Homo sapiens
QQYNSYTIS

SEQ ID NO: 12848 - protein, 9 aa, Homo sapiens
QQYNSYWIT

SEQ ID NO: 12849 - protein, 8 aa, Homo sapiens
QQYNSYYT

SEQ ID NO: 12850 - protein, 9 aa, Homo sapiens
QQYNTFPPT

SEQ ID NO: 12851 - protein, 9 aa, Homo sapiens
QQYNTSPLT

SEQ ID NO: 12852 - protein, 10 aa, Homo sapiens
QQYNTWPPLT

SEQ ID NO: 12853 - protein, 8 aa, Homo sapiens
QQYNTYSA

SEQ ID NO: 12854 - protein, 9 aa, Homo sapiens
QQYNTYYIT

SEQ ID NO: 12855 - protein, 9 aa, Homo sapiens
QQYNYWPLT

SEQ ID NO: 12856 - protein, 10 aa, Homo sapiens
QQYNYWPPWT

SEQ ID NO: 12857 - protein, 10 aa, Homo sapiens
QQYNYWPPYT

SEQ ID NO: 12858 - protein, 9 aa, Homo sapiens
QQYNYYSWT

SEQ ID NO: 12859 - protein, 9 aa, Homo sapiens
QQYQMYPVT

SEQ ID NO: 12860 - protein, 9 aa, Homo sapiens
QQYQRYSWT

SEQ ID NO: 12861 - protein, 9 aa, Homo sapiens
QQYQSYSWT

SEQ ID NO: 12862 - protein, 9 aa, Homo sapiens
QQYRSSPLT

SEQ ID NO: 12863 - protein, 5 aa, Homo sapiens
QQYRT

SEQ ID NO: 12864 - protein, 10 aa, Homo sapiens
QQYSFWPPWT

SEQ ID NO: 12865 - protein, 9 aa, Homo sapiens
QQYSGSPPT

SEQ ID NO: 12866 - protein, 11 aa, Homo sapiens
QQYSNWPPAYS

SEQ ID NO: 12867 - protein, 10 aa, Homo sapiens
QQYSNWPPIT

SEQ ID NO: 12868 - protein, 10 aa, Homo sapiens
QQYSNWPPLT

SEQ ID NO: 12869 - protein, 10 aa, Homo sapiens
QQYSNYPYVT

SEQ ID NO: 12870 - protein, 10 aa, Homo sapiens
QQYSSSPMYT

SEQ ID NO: 12871 - protein, 9 aa, Homo sapiens
QQYSSSSLT

SEQ ID NO: 12872 - protein, 9 aa, Homo sapiens
QQYSSSTYS

SEQ ID NO: 12873 - protein, 9 aa, Homo sapiens
QQYSSYLGT

SEQ ID NO: 12874 - protein, 9 aa, Homo sapiens
QQYSSYPGT

SEQ ID NO: 12875 - protein, 9 aa, Homo sapiens
QQYSSYPIT

SEQ ID NO: 12876 - protein, 11 aa, Homo sapiens
QQYSSYSGAIT

SEQ ID NO: 12877 - protein, 9 aa, Homo sapiens
QQYSSYSGT

SEQ ID NO: 12878 - protein, 9 aa, Homo sapiens
QQYSSYSWT

SEQ ID NO: 12879 - protein, 9 aa, Homo sapiens
QQYSTSILT

SEQ ID NO: 12880 - protein, 10 aa, Homo sapiens
QQYSTYARYT

SEQ ID NO: 12881 - protein, 9 aa, Homo sapiens
QQYSTYPYS

SEQ ID NO: 12882 - protein, 10 aa, Homo sapiens
QQYSTYSMFT

SEQ ID NO: 12883 - protein, 10 aa, Homo sapiens
QQYSTYSQVT

SEQ ID NO: 12884 - protein, 11 aa, Homo sapiens
QQYSVSLSKYT

SEQ ID NO: 12885 - protein, 10 aa, Homo sapiens
QQYTDWPPWT

SEQ ID NO: 12886 - protein, 10 aa, Homo sapiens
QQYTFWPPWT

SEQ ID NO: 12887 - protein, 10 aa, Homo sapiens
QQYTNWPPIT

SEQ ID NO: 12888 - protein, 10 aa, Homo sapiens
QQYTSFSPWT

SEQ ID NO: 12889 - protein, 9 aa, Homo sapiens
QQYTSYPWT

SEQ ID NO: 12890 - protein, 9 aa, Homo sapiens
QQYTTYSQT

SEQ ID NO: 12891 - protein, 10 aa, Homo sapiens
QQYTYWPPWT

SEQ ID NO: 12892 - protein, 9 aa, Homo sapiens
QQYVSSPIT

SEQ ID NO: 12893 - protein, 9 aa, Homo sapiens
QQYYAFPLT

SEQ ID NO: 12894 - protein, 9 aa, Homo sapiens
QQYYATPGT

SEQ ID NO: 12895 - protein, 9 aa, Homo sapiens
QQYYATPLT

SEQ ID NO: 12896 - protein, 9 aa, Homo sapiens
QQYYATPWT

SEQ ID NO: 12897 - protein, 9 aa, Homo sapiens
QQYYATPYT

SEQ ID NO: 12898 - protein, 9 aa, Homo sapiens
QQYYAYPFT

SEQ ID NO: 12899 - protein, 9 aa, Homo sapiens
QQYYDAAFT

SEQ ID NO: 12900 - protein, 9 aa, Homo sapiens
QQYYDDAFT

SEQ ID NO: 12901 - protein, 9 aa, Homo sapiens
QQYYDDRYT

SEQ ID NO: 12902 - protein, 9 aa, Homo sapiens
QQYYDIPFT

SEQ ID NO: 12903 - protein, 9 aa, Homo sapiens
QQYYDIPIT

SEQ ID NO: 12904 - protein, 9 aa, Homo sapiens
QQYYDIPLT

SEQ ID NO: 12905 - protein, 9 aa, Homo sapiens
QQYYDIPYT

SEQ ID NO: 12906 - protein, 8 aa, Homo sapiens
QQYYDKPT

SEQ ID NO: 12907 - protein, 9 aa, Homo sapiens
QQYYDLPLT

SEQ ID NO: 12908 - protein, 9 aa, Homo sapiens
QQYYDNTFT

SEQ ID NO: 12909 - protein, 9 aa, Homo sapiens
QQYYDRPWT

SEQ ID NO: 12910 - protein, 9 aa, Homo sapiens
QQYYDSPLA

SEQ ID NO: 12911 - protein, 9 aa, Homo sapiens
QQYYDTPFT

SEQ ID NO: 12912 - protein, 9 aa, Homo sapiens
QQYYDTPIT

SEQ ID NO: 12913 - protein, 9 aa, Homo sapiens
QQYYDTPPT

SEQ ID NO: 12914 - protein, 9 aa, Homo sapiens
QQYYDTPRT

SEQ ID NO: 12915 - protein, 8 aa, Homo sapiens
QQYYDTPS

SEQ ID NO: 12916 - protein, 9 aa, Homo sapiens
QQYYDTPST

SEQ ID NO: 12917 - protein, 9 aa, Homo sapiens
QQYYDTPVT

SEQ ID NO: 12918 - protein, 9 aa, Homo sapiens
QQYYDYPLT

SEQ ID NO: 12919 - protein, 9 aa, Homo sapiens
QQYYETPVT

SEQ ID NO: 12920 - protein, 9 aa, Homo sapiens
QQYYEYPFT

SEQ ID NO: 12921 - protein, 9 aa, Homo sapiens
QQYYGFPFT

SEQ ID NO: 12922 - protein, 9 aa, Homo sapiens
QQYYGGPIT

SEQ ID NO: 12923 - protein, 9 aa, Homo sapiens
QQYYGHPFT

SEQ ID NO: 12924 - protein, 9 aa, Homo sapiens
QQYYGIPIT

SEQ ID NO: 12925 - protein, 9 aa, Homo sapiens
QQYYGIPLT

SEQ ID NO: 12926 - protein, 9 aa, Homo sapiens
QQYYGLPLT

SEQ ID NO: 12927 - protein, 9 aa, Homo sapiens
QQYYGNPHT

SEQ ID NO: 12928 - protein, 9 aa, Homo sapiens
QQYYGNPQT

SEQ ID NO: 12929 - protein, 9 aa, Homo sapiens
QQYYGSPHT

SEQ ID NO: 12930 - protein, 9 aa, Homo sapiens
QQYYGSPYT

SEQ ID NO: 12931 - protein, 9 aa, Homo sapiens
QQYYGTPFT

SEQ ID NO: 12932 - protein, 9 aa, Homo sapiens
QQYYGTPHT

SEQ ID NO: 12933 - protein, 9 aa, Homo sapiens
QQYYGTPWT

SEQ ID NO: 12934 - protein, 9 aa, Homo sapiens
QQYYGVPHT

SEQ ID NO: 12935 - protein, 9 aa, Homo sapiens
QQYYGYPFT

SEQ ID NO: 12936 - protein, 9 aa, Homo sapiens
QQYYGYPLT

SEQ ID NO: 12937 - protein, 9 aa, Homo sapiens
QQYYHTPFT

SEQ ID NO: 12938 - protein, 9 aa, Homo sapiens
QQYYIGPPT

SEQ ID NO: 12939 - protein, 9 aa, Homo sapiens
QQYYISNLS

SEQ ID NO: 12940 - protein, 9 aa, Homo sapiens
QQYYNIPLS

SEQ ID NO: 12941 - protein, 9 aa, Homo sapiens
QQYYNIPLT

SEQ ID NO: 12942 - protein, 9 aa, Homo sapiens
QQYYNIPPA

SEQ ID NO: 12943 - protein, 10 aa, Homo sapiens
QQYYNPGALT

SEQ ID NO: 12944 - protein, 10 aa, Homo sapiens
QQYYNTPPST

SEQ ID NO: 12945 - protein, 9 aa, Homo sapiens
QQYYNTPRT

SEQ ID NO: 12946 - protein, 10 aa, Homo sapiens
QQYYNWPPIT

SEQ ID NO: 12947 - protein, 10 aa, Homo sapiens
QQYYNWPPLT

SEQ ID NO: 12948 - protein, 9 aa, Homo sapiens
QQYYNWPPT

SEQ ID NO: 12949 - protein, 9 aa, Homo sapiens
QQYYNYPLT

SEQ ID NO: 12950 - protein, 9 aa, Homo sapiens
QQYYRYPYT

SEQ ID NO: 12951 - protein, 9 aa, Homo sapiens
QQYYSAPFT

SEQ ID NO: 12952 - protein, 9 aa, Homo sapiens
QQYYSAPLT

SEQ ID NO: 12953 - protein, 9 aa, Homo sapiens
QQYYSDHFT

SEQ ID NO: 12954 - protein, 9 aa, Homo sapiens
QQYYSDPPD

SEQ ID NO: 12955 - protein, 9 aa, Homo sapiens
QQYYSDTFT

SEQ ID NO: 12956 - protein, 9 aa, Homo sapiens
QQYYSDVFT

SEQ ID NO: 12957 - protein, 9 aa, Homo sapiens
QQYYSFPLT

SEQ ID NO: 12958 - protein, 9 aa, Homo sapiens
QQYYSFPYT

SEQ ID NO: 12959 - protein, 9 aa, Homo sapiens
QQYYSIPLT

SEQ ID NO: 12960 - protein, 9 aa, Homo sapiens
QQYYSIPPT

SEQ ID NO: 12961 - protein, 8 aa, Homo sapiens
QQYYSIPT

SEQ ID NO: 12962 - protein, 9 aa, Homo sapiens
QQYYSIPYT

SEQ ID NO: 12963 - protein, 9 aa, Homo sapiens
QQYYSKPLT

SEQ ID NO: 12964 - protein, 9 aa, Homo sapiens
QQYYSLPLS

SEQ ID NO: 12965 - protein, 9 aa, Homo sapiens
QQYYSNPPT

SEQ ID NO: 12966 - protein, 9 aa, Homo sapiens
QQYYSNTWT

SEQ ID NO: 12967 - protein, 10 aa, Homo sapiens
QQYYSPPPFT

SEQ ID NO: 12968 - protein, 9 aa, Homo sapiens
QQYYSSPLT

SEQ ID NO: 12969 - protein, 10 aa, Homo sapiens
QQYYSTLAAT

SEQ ID NO: 12970 - protein, 10 aa, Homo sapiens
QQYYSTLSAT

SEQ ID NO: 12971 - protein, 10 aa, Homo sapiens
QQYYSTLVFT

SEQ ID NO: 12972 - protein, 9 aa, Homo sapiens
QQYYSTPFT

SEQ ID NO: 12973 - protein, 9 aa, Homo sapiens
QQYYSTPIT

SEQ ID NO: 12974 - protein, 10 aa, Homo sapiens
QQYYSTPLFT

SEQ ID NO: 12975 - protein, 9 aa, Homo sapiens
QQYYSTPLT

SEQ ID NO: 12976 - protein, 10 aa, Homo sapiens
QQYYSTPLYT

SEQ ID NO: 12977 - protein, 9 aa, Homo sapiens
QQYYSTPPF

SEQ ID NO: 12978 - protein, 10 aa, Homo sapiens
QQYYSTPPHT

SEQ ID NO: 12979 - protein, 11 aa, Homo sapiens
QQYYSTPPMYT

SEQ ID NO: 12980 - protein, 9 aa, Homo sapiens
QQYYSTPPT

SEQ ID NO: 12981 - protein, 10 aa, Homo sapiens
QQYYSTPPVT

SEQ ID NO: 12982 - protein, 10 aa, Homo sapiens
QQYYSTPPWT

SEQ ID NO: 12983 - protein, 11 aa, Homo sapiens
QQYYSTPQRYT

SEQ ID NO: 12984 - protein, 9 aa, Homo sapiens
QQYYSTPQT

SEQ ID NO: 12985 - protein, 9 aa, Homo sapiens
QQYYSTPRT

SEQ ID NO: 12986 - protein, 8 aa, Homo sapiens
QQYYSTPS

SEQ ID NO: 12987 - protein, 9 aa, Homo sapiens
QQYYSTPST

SEQ ID NO: 12988 - protein, 10 aa, Homo sapiens
QQYYSTPSWT

SEQ ID NO: 12989 - protein, 8 aa, Homo sapiens
QQYYSTPT

SEQ ID NO: 12990 - protein, 10 aa, Homo sapiens
QQYYSTPTWT

SEQ ID NO: 12991 - protein, 8 aa, Homo sapiens
QQYYSTPV

SEQ ID NO: 12992 - protein, 9 aa, Homo sapiens
QQYYSTPWT

SEQ ID NO: 12993 - protein, 9 aa, Homo sapiens
QQYYSTPYS

SEQ ID NO: 12994 - protein, 9 aa, Homo sapiens
QQYYSTPYT

SEQ ID NO: 12995 - protein, 10 aa, Homo sapiens
QQYYSTRMYT

SEQ ID NO: 12996 - protein, 9 aa, Homo sapiens
QQYYSTSQT

SEQ ID NO: 12997 - protein, 10 aa, Homo sapiens
QQYYSTYLYT

SEQ ID NO: 12998 - protein, 9 aa, Homo sapiens
QQYYSWPRS

SEQ ID NO: 12999 - protein, 8 aa, Homo sapiens
QQYYSWSS

SEQ ID NO: 13000 - protein, 11 aa, Homo sapiens
QQYYSYLRQWT

SEQ ID NO: 13001 - protein, 8 aa, Homo sapiens
QQYYSYLT

SEQ ID NO: 13002 - protein, 9 aa, Homo sapiens
QQYYSYPHT

SEQ ID NO: 13003 - protein, 10 aa, Homo sapiens
QQYYSYPMYT

SEQ ID NO: 13004 - protein, 10 aa, Homo sapiens
QQYYSYPPLT

SEQ ID NO: 13005 - protein, 9 aa, Homo sapiens
QQYYSYPRT

SEQ ID NO: 13006 - protein, 9 aa, Homo sapiens
QQYYSYPYT

SEQ ID NO: 13007 - protein, 9 aa, Homo sapiens
QQYYTDVRT

SEQ ID NO: 13008 - protein, 9 aa, Homo sapiens
QQYYTMPYT

SEQ ID NO: 13009 - protein, 9 aa, Homo sapiens
QQYYTTPFT

SEQ ID NO: 13010 - protein, 9 aa, Homo sapiens
QQYYTTPWT

SEQ ID NO: 13011 - protein, 9 aa, Homo sapiens
QQYYTTPYT

SEQ ID NO: 13012 - protein, 9 aa, Homo sapiens
QQYYTYSYT

SEQ ID NO: 13013 - protein, 9 aa, Homo sapiens
QQYYYLPLT

SEQ ID NO: 13014 - protein, 14 aa, Homo sapiens
QRAIGAAGTGHFES

SEQ ID NO: 13015 - protein, 15 aa, Homo sapiens
QRLRANYYYYYGMDV

SEQ ID NO: 13016 - protein, 9 aa, Homo sapiens
QRYGNSPET

SEQ ID NO: 13017 - protein, 9 aa, Homo sapiens
QRYNSAPAT

SEQ ID NO: 13018 - protein, 9 aa, Homo sapiens
QRYNSYPLG

SEQ ID NO: 13019 - protein, 10 aa, Homo sapiens
QRYNSYSLFT

SEQ ID NO: 13020 - protein, 12 aa, Homo sapiens
QSADSSATYAWV

SEQ ID NO: 13021 - protein, 12 aa, Homo sapiens
QSADSSATYAWV

SEQ ID NO: 13022 - protein, 11 aa, Homo sapiens
QSADSSDSFVL

SEQ ID NO: 13023 - protein, 10 aa, Homo sapiens
QSADSSGSYV

SEQ ID NO: 13024 - protein, 11 aa, Homo sapiens
QSADSSGSYVV

SEQ ID NO: 13025 - protein, 11 aa, Homo sapiens
QSADSSGTHGV

SEQ ID NO: 13026 - protein, 10 aa, Homo sapiens
QSADSSGTLV

SEQ ID NO: 13027 - protein, 10 aa, Homo sapiens
QSADSSGTRV

SEQ ID NO: 13028 - protein, 11 aa, Homo sapiens
QSADSSGTSVV

SEQ ID NO: 13029 - protein, 10 aa, Homo sapiens
QSADSSGTWV

SEQ ID NO: 13030 - protein, 12 aa, Homo sapiens
QSADSSGTYPVV

SEQ ID NO: 13031 - protein, 11 aa, Homo sapiens
QSADSSGTYVV

SEQ ID NO: 13032 - protein, 9 aa, Homo sapiens
QSADSSGWV

SEQ ID NO: 13033 - protein, 13 aa, Homo sapiens
QSADTIDSYWGAV

SEQ ID NO: 13034 - protein, 11 aa, Homo sapiens
QSADTSGTYRV

SEQ ID NO: 13035 - protein, 12 aa, Homo sapiens
QSADTTTSYGGV

SEQ ID NO: 13036 - protein, 98 aa, Homo sapiens
QSALIQPRSVSGSPGQSITISCSGTSSDVGNYNYISWYQQHPGKAPKVMIYDVNKRPSGVPDRFSGSKSGNTASLTISGLQAEDEADYYCCSYAGSSS

SEQ ID NO: 13037 - protein, 110 aa, Homo sapiens
QSALIQPRSVSGSPGQSITISCSGTSSDVGNYNYISWYQQHPGKAPKVMIYDVNKRPSGVPDRFSGSKSGNTASLTISGLQAEDEADYYCCSYAGSSSWVFGGGTKLTVL

SEQ ID NO: 13038 - protein, 97 aa, Homo sapiens
QSALTQEASMSGTVGQKVTLSCSGNSDNVGSYAVGWYQQISHGAPKSVMFGNSLPSGIPDRFSGSKSGTTASLTISGLQPEDEADYYCSVWDDRLNA

SEQ ID NO: 13039 - protein, 109 aa, Homo sapiens
QSALTQEASMSGTVGQKVTLSCSGNSDNVGSYAVGWYQQISHGAPKSVMFGNSLPSGIPDRFSGSKSGTTASLTISGLQPEDEADYYCSVWDDRLNARVFGGGTKLTVL

SEQ ID NO: 13040 - protein, 98 aa, Homo sapiens
QSALTQEASVSGAVGQKVTLSCAGSSNNVGTFAVGWYQQISHGVPKTVMLGNFVPSLPSGIPDRFSGSKSGTTASLTISGLQPEDEADYYCSTWDSSL

SEQ ID NO: 13041 - protein, 112 aa, Homo sapiens
QSALTQEASVSGAVGQKVTLSCAGSSNNVGTFAVGWYQQISHGVPKTVMLGNFVPSLPSGIPDRFSGSKSGTTASLTISGLQPEDEADYYCSTWDSSLSSQVFGGGTKLTVL

SEQ ID NO: 13042 - protein, 96 aa, Homo sapiens
QSALTQEASVSGTVGQKVTLSCIGNSNNIGKYAVGWYQQISHGVPKTVMFGNSLPSGIPDRFSGSKSGTTASLTISGLQPEDEADYYCSTWDFSLS

SEQ ID NO: 13043 - protein, 109 aa, Homo sapiens
QSALTQEASVSGTVGQKVTLSCIGNSNNIGKYAVGWYQQISHGVPKTVMFGNSLPSGIPDRFSGSKSGTTASLTISGLQPEDEADYYCSTWDFSLSVWVFGGGTKVTVL

SEQ ID NO: 13044 - protein, 96 aa, Homo sapiens
QSALTQEASVSGTVGQKVTLSCTGNSNNIGSYGVGWYQQISHGAPKTVMFGNSPPSGIPDRFSGSQSGTTASLTISGLQPEDEADYYCSTWDSSLT

SEQ ID NO: 13045 - protein, 109 aa, Homo sapiens
QSALTQEASVSGTVGQKVTLSCTGNSNNIGSYGVGWYQQISHGAPKTVMFGNSPPSGIPDRFSGSQSGTTASLTISGLQPEDEADYYCSTWDSSLTAYVFGTGTKVTVL

SEQ ID NO: 13046 - protein, 96 aa, Homo sapiens
QSALTQEASVSGTVGQKVTLSCTGNSNSVGRYAVGWYQQISHGAPKTVMFGNSLPSGIPDRFSGSKSGTTASLTISGLQPEDEADYYCSTWDYSLS

SEQ ID NO: 13047 - protein, 109 aa, Homo sapiens
QSALTQEASVSGTVGQKVTLSCTGNSNSVGRYAVGWYQQISHGAPKTVMFGNSLPSGIPDRFSGSKSGTTASLTISGLQPEDEADYYCSTWDYSLSAWVFGGGTKLTVL

SEQ ID NO: 13048 - protein, 97 aa, Homo sapiens
QSALTQEASVSGTVGQKVTLSCTGSSKNIGSYAVGWYQQISHGAPKTVMFANSLPSGIPDRFSGSQSGTTASLTISGLQPEDEAGYYCSTWDDSLSA

SEQ ID NO: 13049 - protein, 109 aa, Homo sapiens
QSALTQEASVSGTVGQKVTLSCTGSSKNIGSYAVGWYQQISHGAPKTVMFANSLPSGIPDRFSGSQSGTTASLTISGLQPEDEAGYYCSTWDDSLSAQVFGGGTKLTVL

SEQ ID NO: 13050 - protein, 95 aa, Homo sapiens
QSALTQEASVSGTVGQRVTLSCTGNSNNVGTYGVGWYQQISHGAPKTVMFGNSLPSGISDRFSASKSGTTASLTISGLQPEDEADYYCSTWDSSL

SEQ ID NO: 13051 - protein, 109 aa, Homo sapiens
QSALTQEASVSGTVGQRVTLSCTGNSNNVGTYGVGWYQQISHGAPKTVMFGNSLPSGISDRFSASKSGTTASLTISGLQPEDEADYYCSTWDSSLNAVVVGGGTKLTVL

SEQ ID NO: 13052 - protein, 99 aa, Homo sapiens
QSALTQPASVSASPGQSITISCTGTSSDIGNNNHVSWYQQVPGKAPQVMIYEVNKRPSGISNRFSGSKSGNTASLTISGLQPEDEADYYCTSYSSSGTL

SEQ ID NO: 13053 - protein, 111 aa, Homo sapiens
QSALTQPASVSASPGQSITISCTGTSSDIGNNNHVSWYQQVPGKAPQVMIYEVNKRPSGISNRFSGSKSGNTASLTISGLQPEDEADYYCTSYSSSGTLYVFGSGTKVTVL

SEQ ID NO: 13054 - protein, 98 aa, Homo sapiens
QSALTQPASVSASPGQSITISCTGTSSDVGGYNYVSWYQVHPAKAPKLILYDVNKRPSGISDRFSGSKSGNTASLTISGLHVEDEADYFCNSYTDSTT

SEQ ID NO: 13055 - protein, 110 aa, Homo sapiens
QSALTQPASVSASPGQSITISCTGTSSDVGGYNYVSWYQVHPAKAPKLILYDVNKRPSGISDRFSGSKSGNTASLTISGLHVEDEADYFCNSYTDSTTYVFGSGTKVTVL

SEQ ID NO: 13056 - protein, 95 aa, Homo sapiens
QSALTQPASVSGSLGQSITISCTGTNSDVGAYEYVSWYQQHPGHAPRVLIYAVTIRPPGVSDRFSGSKSGNTASLTISGLQADDEADYFCSSYLI

SEQ ID NO: 13057 - protein, 114 aa, Homo sapiens
QSALTQPASVSGSLGQSITISCTGTNSDVGAYEYVSWYQQHPGHAPRVLIYAVTIRPPGVSDRFSGSKSGNTASLTISGLQADDEADYFCSSYLISASTYSNYAFGTGTKVTVL

SEQ ID NO: 13058 - protein, 98 aa, Homo sapiens
QSALTQPASVSGSLGQSITISCTGTSSDVGNYNLVSWYQQHPGKAPKFIIYEGTKRPSGVSNRFSGSKSGNTASLTISGLQAEDEADYFCCSYADGST

SEQ ID NO: 13059 - protein, 110 aa, Homo sapiens
QSALTQPASVSGSLGQSITISCTGTSSDVGNYNLVSWYQQHPGKAPKFIIYEGTKRPSGVSNRFSGSKSGNTASLTISGLQAEDEADYFCCSYADGSTAVFGGGTKLTVL

SEQ ID NO: 13060 - protein, 99 aa, Homo sapiens
QSALTQPASVSGSLGQSITISCTGTSSDVGSYNLVSWYQQHPGKAPKLIIYEVSKRPSGVSNRFSGSKSGNTASLTISGLQAEDEADYYCCSYANSNTF

SEQ ID NO: 13061 - protein, 112 aa, Homo sapiens
QSALTQPASVSGSLGQSITISCTGTSSDVGSYNLVSWYQQHPGKAPKLIIYEVSKRPSGVSNRFSGSKSGNTASLTISGLQAEDEADYYCCSYANSNTFERVFGGGTKLTVL

SEQ ID NO: 13062 - protein, 99 aa, Homo sapiens
QSALTQPASVSGSPGQSITISCFGNTSDVVDYNSVTWYQQHPDKAPKLIIYDVYNRPSRISNRFSGSKSGNTASLTISVVQADDEADYYCSSYTRGTSL

SEQ ID NO: 13063 - protein, 111 aa, Homo sapiens
QSALTQPASVSGSPGQSITISCFGNTSDVVDYNSVTWYQQHPDKAPKLIIYDVYNRPSRISNRFSGSKSGNTASLTISVVQADDEADYYCSSYTRGTSLVVFGGGTKLTVL

SEQ ID NO: 13064 - protein, 96 aa, Homo sapiens
QSALTQPASVSGSPGQSITISCTGSSSDIGDYNYVSWYQQHPGKAPKLVIYEVTNRPSGISSRFSGSKSGNTASLTISGLQAEDEADYYCSSYTST

SEQ ID NO: 13065 - protein, 111 aa, Homo sapiens
QSALTQPASVSGSPGQSITISCTGSSSDIGDYNYVSWYQQHPGKAPKLVIYEVTNRPSGISSRFSGSKSGNTASLTISGLQAEDEADYYCSSYTSTTLHVLFGGGTKLTVL

SEQ ID NO: 13066 - protein, 96 aa, Homo sapiens
QSALTQPASVSGSPGQSITISCTGTISDIGDYNYVSWYQQVPGKAPKLMIYDVSDRPSGVSNRFSGSKSGNTASLTISGIQSEDEANYYCSLYTTT

SEQ ID NO: 13067 - protein, 109 aa, Homo sapiens
QSALTQPASVSGSPGQSITISCTGTISDIGDYNYVSWYQQVPGKAPKLMIYDVSDRPSGVSNRFSGSKSGNTASLTISGIQSEDEANYYCSLYTTTTVLFGGGTRLTVL

SEQ ID NO: 13068 - protein, 95 aa, Homo sapiens
QSALTQPASVSGSPGQSITISCTGTNSDVGGYNYVSWYQQHPGKAPKLIIYDVSYRPSGVSSRFSGSKSGNTASLTISGLQSEDEADYYCNSYTS

SEQ ID NO: 13069 - protein, 109 aa, Homo sapiens
QSALTQPASVSGSPGQSITISCTGTNSDVGGYNYVSWYQQHPGKAPKLIIYDVSYRPSGVSSRFSGSKSGNTASLTISGLQSEDEADYYCNSYTSRTSVFGGGTKLTVL

SEQ ID NO: 13070 - protein, 98 aa, Homo sapiens
QSALTQPASVSGSPGQSITISCTGTNSDVGSYNLVSWYQQHPGKAPKLMIYEGTKRPSGVSNRFSGSKSGNTASLTVSGLQAEDEAEYYCCSYAGSNS

SEQ ID NO: 13071 - protein, 110 aa, Homo sapiens
QSALTQPASVSGSPGQSITISCTGTNSDVGSYNLVSWYQQHPGKAPKLMIYEGTKRPSGVSNRFSGSKSGNTASLTVSGLQAEDEAEYYCCSYAGSNSWVFGGGTKLTVL

SEQ ID NO: 13072 - protein, 98 aa, Homo sapiens
QSALTQPASVSGSPGQSITISCTGTNSNVGGYNHVSWFQQHPDKAPKLLIYEVTNRPLGASYRFSGSKSGNTASLTISGLQAEDEAYYYCSSHTSSNT

SEQ ID NO: 13073 - protein, 110 aa, Homo sapiens
QSALTQPASVSGSPGQSITISCTGTNSNVGGYNHVSWFQQHPDKAPKLLIYEVTNRPLGASYRFSGSKSGNTASLTISGLQAEDEAYYYCSSHTSSNTFLFGTGTKVTVL

SEQ ID NO: 13074 - protein, 98 aa, Homo sapiens
QSALTQPASVSGSPGQSITISCTGTRSDIGTYNYVSWYQQHPGKAPKVMISDVSMRPSGVSNRFSGSKSGNTASLTISGLQAEDEADYYCSSSRSGST

SEQ ID NO: 13075 - protein, 110 aa, Homo sapiens
QSALTQPASVSGSPGQSITISCTGTRSDIGTYNYVSWYQQHPGKAPKVMISDVSMRPSGVSNRFSGSKSGNTASLTISGLQAEDEADYYCSSSRSGSTYVFGTGTKVTVL

SEQ ID NO: 13076 - protein, 98 aa, Homo sapiens
QSALTQPASVSGSPGQSITISCTGTSGDIGAYNYVSWYQQHPGKAPKLMIYEVSNRPSGVSDRFSGSKSGDTASLTISGLQPEDEADYYCCSYTTSNT

SEQ ID NO: 13077 - protein, 110 aa, Homo sapiens
QSALTQPASVSGSPGQSITISCTGTSGDIGAYNYVSWYQQHPGKAPKLMIYEVSNRPSGVSDRFSGSKSGDTASLTISGLQPEDEADYYCCSYTTSNTWVFGGGTKLTVL

SEQ ID NO: 13078 - protein, 99 aa, Homo sapiens
QSALTQPASVSGSPGQSITISCTGTSNDVGAYDSVSWYQQHPGKAPKLIIFGVTNRPSGVSTRFSGSKSGTTASLTISGLQAEDEADYYCSSYTSSVSL

SEQ ID NO: 13079 - protein, 111 aa, Homo sapiens
QSALTQPASVSGSPGQSITISCTGTSNDVGAYDSVSWYQQHPGKAPKLIIFGVTNRPSGVSTRFSGSKSGTTASLTISGLQAEDEADYYCSSYTSSVSLDVFGTGTKVTVL

SEQ ID NO: 13080 - protein, 98 aa, Homo sapiens
QSALTQPASVSGSPGQSITISCTGTSNDVGGYNYVSWYQQHPGKAPKVMIYDVSKRPSGVSNRFSGSRSGNTASLTISGLQAEDEADYYCCSYAHSRT

SEQ ID NO: 13081 - protein, 110 aa, Homo sapiens
QSALTQPASVSGSPGQSITISCTGTSNDVGGYNYVSWYQQHPGKAPKVMIYDVSKRPSGVSNRFSGSRSGNTASLTISGLQAEDEADYYCCSYAHSRTYVFGTGTQVTVL

SEQ ID NO: 13082 - protein, 99 aa, Homo sapiens
QSALTQPASVSGSPGQSITISCTGTSRDVGNYNLVSWYQQRPGKAPKVLIYEGSKRPSGVSNRFSGSKSGNTASLTISGLQAEDEADFYCCSYAGSNTV

SEQ ID NO: 13083 - protein, 110 aa, Homo sapiens
QSALTQPASVSGSPGQSITISCTGTSRDVGNYNLVSWYQQRPGKAPKVLIYEGSKRPSGVSNRFSGSKSGNTASLTISGLQAEDEADFYCCSYAGSNTVLFGGGTKLTVL

SEQ ID NO: 13084 - protein, 95 aa, Homo sapiens
QSALTQPASVSGSPGQSITISCTGTSSDFGSYNLVSWYQQYLGKAPKLMIYEVTKRPSGVSNRFSGSKSGNTASLTISGLQAEDEADYYCCSYAG

SEQ ID NO: 13085 - protein, 108 aa, Homo sapiens
QSALTQPASVSGSPGQSITISCTGTSSDFGSYNLVSWYQQYLGKAPKLMIYEVTKRPSGVSNRFSGSKSGNTASLTISGLQAEDEADYYCCSYAGHVVFGGGTKLTVL

SEQ ID NO: 13086 - protein, 96 aa, Homo sapiens
QSALTQPASVSGSPGQSITISCTGTSSDIGAYNFVSWYQQHPGKAPKLIIYDVNNRPSGVSNRFSGSKSGNTASLTISGLQAEDEATYYCSSYTGT

SEQ ID NO: 13087 - protein, 111 aa, Homo sapiens
QSALTQPASVSGSPGQSITISCTGTSSDIGAYNFVSWYQQHPGKAPKLIIYDVNNRPSGVSNRFSGSKSGNTASLTISGLQAEDEATYYCSSYTGTTVVRVFGGGTKLTVL

SEQ ID NO: 13088 - protein, 98 aa, Homo sapiens
QSALTQPASVSGSPGQSITISCTGTSSDIGGYNYVSWYQQHPGKVPKVIIFDVSNRPSGASNRFSGSKSGNTASLTISGLQAEDEADYYCSSYTSSNT

SEQ ID NO: 13089 - protein, 110 aa, Homo sapiens
QSALTQPASVSGSPGQSITISCTGTSSDIGGYNYVSWYQQHPGKVPKVIIFDVSNRPSGASNRFSGSKSGNTASLTISGLQAEDEADYYCSSYTSSNTRVFGGGTKLTVL

SEQ ID NO: 13090 - protein, 98 aa, Homo sapiens
QSALTQPASVSGSPGQSITISCTGTSSDLGTYEYVSWYQQHSGKAPKLIIFDVTKRPSGVSSRFSGSKSGNTASLTISGLQAEDEADYYCCSYAGPGT

SEQ ID NO: 13091 - protein, 110 aa, Homo sapiens
QSALTQPASVSGSPGQSITISCTGTSSDLGTYEYVSWYQQHSGKAPKLIIFDVTKRPSGVSSRFSGSKSGNTASLTISGLQAEDEADYYCCSYAGPGTSLSGSGTKVTVL

SEQ ID NO: 13092 - protein, 98 aa, Homo sapiens
QSALTQPASVSGSPGQSITISCTGTSSDVGASDSVSWYQQHPAKAPKLMIYDVDKRPSGVSNRFSGSKSGNTASLTISGLQAEDEADYYCSSYTRRTT

SEQ ID NO: 13093 - protein, 111 aa, Homo sapiens
QSALTQPASVSGSPGQSITISCTGTSSDVGASDSVSWYQQHPAKAPKLMIYDVDKRPSGVSNRFSGSKSGNTASLTISGLQAEDEADYYCSSYTRRTTPYVFGTGTKVTVL

SEQ ID NO: 13094 - protein, 98 aa, Homo sapiens
QSALTQPASVSGSPGQSITISCTGTSSDVGAYNFVSWYQQHPGKAPKLIIYEVSNRPSGVSNRFSGSKSGNTASLTISGLQAEDEADYYCNSYRSDST

SEQ ID NO: 13095 - protein, 110 aa, Homo sapiens
QSALTQPASVSGSPGQSITISCTGTSSDVGAYNFVSWYQQHPGKAPKLIIYEVSNRPSGVSNRFSGSKSGNTASLTISGLQAEDEADYYCNSYRSDSTDVFGTGTRVTVL

SEQ ID NO: 13096 - protein, 99 aa, Homo sapiens
QSALTQPASVSGSPGQSITISCTGTSSDVGAYNYVSWYQQHPGKAPKLMIYDISSRPSGVSNRFSGSKSGNTASLTISGLQAEDEADYYCSSYTSSSTL

SEQ ID NO: 13097 - protein, 111 aa, Homo sapiens
QSALTQPASVSGSPGQSITISCTGTSSDVGAYNYVSWYQQHPGKAPKLMIYDISSRPSGVSNRFSGSKSGNTASLTISGLQAEDEADYYCSSYTSSSTLVVFGGGTKLTVL

SEQ ID NO: 13098 - protein, 97 aa, Homo sapiens
QSALTQPASVSGSPGQSITISCTGTSSDVGGYKFVSWYQQHPAKAPKLMIYEVSKRASGVSNRFSGSKSGNTASLTISGLQAEDEADYYCSSYTSSG

SEQ ID NO: 13099 - protein, 110 aa, Homo sapiens
QSALTQPASVSGSPGQSITISCTGTSSDVGGYKFVSWYQQHPAKAPKLMIYEVSKRASGVSNRFSGSKSGNTASLTISGLQAEDEADYYCSSYTSSGIWVFGGGTKLTVL

SEQ ID NO: 13100 - protein, 98 aa, Homo sapiens
QSALTQPASVSGSPGQSITISCTGTSSDVGGYKYVSWYQHHPGKAPKLLIYEVNDRPSGVSNRFSGSKSGNTASLTISGLQAEDEADYYCSSYTSSNT

SEQ ID NO: 13101 - protein, 112 aa, Homo sapiens
QSALTQPASVSGSPGQSITISCTGTSSDVGGYKYVSWYQHHPGKAPKLLIYEVNDRPSGVSNRFSGSKSGNTASLTISGLQAEDEADYYCSSYTSSNTPLYVFGTGTKVTVL

SEQ ID NO: 13102 - protein, 98 aa, Homo sapiens
QSALTQPASVSGSPGQSITISCTGTSSDVGGYNFISWYRQHPGKAPKLIIYDVYQRPSGVSNRFSASKSGNTASLTISGLQAEDEADYYCSSYTSSST

SEQ ID NO: 13103 - protein, 110 aa, Homo sapiens
QSALTQPASVSGSPGQSITISCTGTSSDVGGYNFISWYRQHPGKAPKLIIYDVYQRPSGVSNRFSASKSGNTASLTISGLQAEDEADYYCSSYTSSSTLLFGGGTKLTVL

SEQ ID NO: 13104 - protein, 98 aa, Homo sapiens
QSALTQPASVSGSPGQSITISCTGTSSDVGGYNSVSWYQQHPGKAPKLMIYDVSKRPSGVSNRFSGSKSGNTASLTISGLQAEDEADYYCSSYTDRTP

SEQ ID NO: 13105 - protein, 110 aa, Homo sapiens
QSALTQPASVSGSPGQSITISCTGTSSDVGGYNSVSWYQQHPGKAPKLMIYDVSKRPSGVSNRFSGSKSGNTASLTISGLQAEDEADYYCSSYTDRTPYVFGTGTKVTVL

SEQ ID NO: 13106 - protein, 95 aa, Homo sapiens
QSALTQPASVSGSPGQSITISCTGTSSDVGGYNSVSWYQQHPGKAPKLMIYDVTQRPSGVSNRFSGSRSGNTASLTISGLQAEDEADYYCSSYTS

SEQ ID NO: 13107 - protein, 111 aa, Homo sapiens
QSALTQPASVSGSPGQSITISCTGTSSDVGGYNSVSWYQQHPGKAPKLMIYDVTQRPSGVSNRFSGSRSGNTASLTISGLQAEDEADYYCSSYTSDIIPVFFGGGTKLTVL

SEQ ID NO: 13108 - protein, 98 aa, Homo sapiens
QSALTQPASVSGSPGQSITISCTGTSSDVGGYNYVSWYQQHPDKAPELMIYDVSNRPSGVSNRFSGSKSGNTASLTISGLQAEDEADYYCSSYTSSST

SEQ ID NO: 13109 - protein, 110 aa, Homo sapiens
QSALTQPASVSGSPGQSITISCTGTSSDVGGYNYVSWYQQHPDKAPELMIYDVSNRPSGVSNRFSGSKSGNTASLTISGLQAEDEADYYCSSYTSSSTVVFGGGTKLTVL

SEQ ID NO: 13110 - protein, 96 aa, Homo sapiens
QSALTQPASVSGSPGQSITISCTGTSSDVGGYNYVSWYQQHPGKAPKIMIFEVNNRPFGVSDRFSGSKSGNTASLTISGLQAEDEGDYYCSSYART

SEQ ID NO: 13111 - protein, 109 aa, Homo sapiens
QSALTQPASVSGSPGQSITISCTGTSSDVGGYNYVSWYQQHPGKAPKIMIFEVNNRPFGVSDRFSGSKSGNTASLTISGLQAEDEGDYYCSSYARTRSWVFGGGTKLTV

SEQ ID NO: 13112 - protein, 98 aa, Homo sapiens
QSALTQPASVSGSPGQSITISCTGTSSDVGGYNYVSWYQQHPGKAPKLMIYDVNKRPSGVSNRFSGSKSGSTASLTISGLQAEDEGDYYCNSFTSSTT

SEQ ID NO: 13113 - protein, 111 aa, Homo sapiens
QSALTQPASVSGSPGQSITISCTGTSSDVGGYNYVSWYQQHPGKAPKLMIYDVNKRPSGVSNRFSGSKSGSTASLTISGLQAEDEGDYYCNSFTSSTTPVVFGGGTKLTVL

SEQ ID NO: 13114 - protein, 98 aa, Homo sapiens
QSALTQPASVSGSPGQSITISCTGTSSDVGGYNYVSWYQQHPGKAPKLMIYDVSDRPSGVSNRFSGSKSGNTASLTISGLQAEDEADYYCSSYTSSST

SEQ ID NO: 13115 - protein, 110 aa, Homo sapiens
QSALTQPASVSGSPGQSITISCTGTSSDVGGYNYVSWYQQHPGKAPKLMIYDVSDRPSGVSNRFSGSKSGNTASLTISGLQAEDEADYYCSSYTSSSTYVFGTGTKVTVL

SEQ ID NO: 13116 - protein, 98 aa, Homo sapiens
QSALTQPASVSGSPGQSITISCTGTSSDVGGYNYVSWYQQHPGKAPKLMIYDVSKRPSGVSNRFSGSKSGNTASLTISGLQAEDEADYYCCSYAGSST

SEQ ID NO: 13117 - protein, 98 aa, Homo sapiens; identical to SEQ ID NO: 13116

SEQ ID NO: 13118 - protein, 110 aa, Homo sapiens
QSALTQPASVSGSPGQSITISCTGTSSDVGGYNYVSWYQQHPGKAPKLMIYDVSKRPSGVSNRFSGSKSGNTASLTISGLQAEDEADYYCCSYAGSSTLVFGGGTKLTVL

SEQ ID NO: 13119 - protein, 110 aa, Homo sapiens
QSALTQPASVSGSPGQSITISCTGTSSDVGGYNYVSWYQQHPGKAPKLMIYDVSKRPSGVSNRFSGSKSGNTASLTISGLQAEDEADYYCCSYAGSSTYVFGTGTKVTVL

SEQ ID NO: 13120 - protein, 97 aa, Homo sapiens
QSALTQPASVSGSPGQSITISCTGTSSDVGGYNYVSWYQQHPGKAPKLMIYDVSKRPSGVSNRFSGSKSGNTASLTISGLQAEDEADYYCSSYTSSS

SEQ ID NO: 13121 - protein, 110 aa, Homo sapiens
QSALTQPASVSGSPGQSITISCTGTSSDVGGYNYVSWYQQHPGKAPKLMIYDVSKRPSGVSNRFSGSKSGNTASLTISGLQAEDEADYYCSSYTSSSAVVFGGGTKLTVL

SEQ ID NO: 13122 - protein, 98 aa, Homo sapiens
QSALTQPASVSGSPGQSITISCTGTSSDVGGYNYVSWYQQHPGKAPKLMIYDVSKRPSGVSNRFSGSKSGNTASLTISGLQAEDEADYYCSSYTSSST

SEQ ID NO: 13123 - protein, 110 aa, Homo sapiens
QSALTQPASVSGSPGQSITISCTGTSSDVGGYNYVSWYQQHPGKAPKLMIYDVSKRPSGVSNRFSGSKSGNTASLTISGLQAEDEADYYCSSYTSSSTVVFGGGTKLTVL

SEQ ID NO: 13124 - protein, 110 aa, Homo sapiens
QSALTQPASVSGSPGQSITISCTGTSSDVGGYNYVSWYQQHPGKAPKLMIYDVSKRPSGVSNRFSGSKSGNTASLTISGLQAEDEADYYCSSYTSSSTYVFGTGTKVTVL

SEQ ID NO: 13125 - protein, 110 aa, Homo sapiens
QSALTQPASVSGSPGQSITISCTGTSSDVGGYNYVSWYQQHPGKAPKLMIYDVSKRPSGVSNRFSGSKSGNTASLTISGLQAEDEADYYCSSYTSSSYVVFGGGTKLTVL

SEQ ID NO: 13126 - protein, 98 aa, Homo sapiens
QSALTQPASVSGSPGQSITISCTGTSSDVGGYNYVSWYQQHPGKAPKLMIYDVSNRPSGVSNRFSGSKSGNTASLTISGLQAEDEADYYCSSYTSSST

SEQ ID NO: 13127 - protein, 99 aa, Homo sapiens
QSALTQPASVSGSPGQSITISCTGTSSDVGGYNYVSWYQQHPGKAPKLMIYDVSNRPSGVSNRFSGSKSGNTASLTISGLQAEDEADYYCSSYTSSSTL

SEQ ID NO: 13128 - protein, 110 aa, Homo sapiens
QSALTQPASVSGSPGQSITISCTGTSSDVGGYNYVSWYQQHPGKAPKLMIYDVSNRPSGVSNRFSGSKSGNTASLTISGLQAEDEADYYCSSYTSSSTLVFGGGTKLTVL

SEQ ID NO: 13129 - protein, 111 aa, Homo sapiens
QSALTQPASVSGSPGQSITISCTGTSSDVGGYNYVSWYQQHPGKAPKLMIYDVSNRPSGVSNRFSGSKSGNTASLTISGLQAEDEADYYCSSYTSSSTLVVFGGGTKLTVL

SEQ ID NO: 13130 - protein, 112 aa, Homo sapiens
QSALTQPASVSGSPGQSITISCTGTSSDVGGYNYVSWYQQHPGKAPKLMIYDVSNRPSGVSNRFSGSKSGNTASLTISGLQAEDEADYYCSSYTSSSTLYVVFGGGTKLTVL

SEQ ID NO: 13131 - protein, 112 aa, Homo sapiens
QSALTQPASVSGSPGQSITISCTGTSSDVGGYNYVSWYQQHPGKAPKLMIYDVSNRPSGVSNRFSGSKSGNTASLTISGLQAEDEADYYCSSYTSSSTPLYVFGTGTKVTVL

SEQ ID NO: 13132 - protein, 110 aa, Homo sapiens
QSALTQPASVSGSPGQSITISCTGTSSDVGGYNYVSWYQQHPGKAPKLMIYDVSNRPSGVSNRFSGSKSGNTASLTISGLQAEDEADYYCSSYTSSSTRVFGGGTKLTVL

SEQ ID NO: 13133 - protein, 110 aa, Homo sapiens
QSALTQPASVSGSPGQSITISCTGTSSDVGGYNYVSWYQQHPGKAPKLMIYDVSNRPSGVSNRFSGSKSGNTASLTISGLQAEDEADYYCSSYTSSSTYVFGTGTKVTVL

SEQ ID NO: 13134 - protein, 111 aa, Homo sapiens
QSALTQPASVSGSPGQSITISCTGTSSDVGGYNYVSWYQQHPGKAPKLMIYDVSNRPSGVSNRFSGSKSGNTASLTISGLQAEDEADYYCSSYTSSSTYWVFGGGTKLTVL

SEQ ID NO: 13135 - protein, 98 aa, Homo sapiens
QSALTQPASVSGSPGQSITISCTGTSSDVGGYNYVSWYQQHPGKAPKLMIYDVTKRPSGVSNHFSGSKSGNTASLTISGLQADDEANYYCCSYAGRSI

SEQ ID NO: 13136 - protein, 110 aa, Homo sapiens
QSALTQPASVSGSPGQSITISCTGTSSDVGGYNYVSWYQQHPGKAPKLMIYDVTKRPSGVSNHFSGSKSGNTASLTISGLQADDEANYYCCSYAGRSIWVFGGGTKLTVL

SEQ ID NO: 13137 - protein, 96 aa, Homo sapiens
QSALTQPASVSGSPGQSITISCTGTSSDVGGYNYVSWYQQHPGKAPKLMIYEVSNRPSGVSNRFSGSKSGNTASLTISGLQAEDEADYYCSSYTSS

SEQ ID NO: 13138 - protein, 110 aa, Homo sapiens
QSALTQPASVSGSPGQSITISCTGTSSDVGGYNYVSWYQQHPGKAPKLMIYEVSNRPSGVSNRFSGSKSGNTASLTISGLQAEDEADYYCSSYTSSILVVFGGGTKLTVL

SEQ ID NO: 13139 - protein, 98 aa, Homo sapiens
QSALTQPASVSGSPGQSITISCTGTSSDVGGYNYVSWYQQHPGKAPKLMIYEVSNRPSGVSNRFSGSKSGNTASLTISGLQAEDEADYYCSSYTSSSS

SEQ ID NO: 13140 - protein, 110 aa, Homo sapiens
QSALTQPASVSGSPGQSITISCTGTSSDVGGYNYVSWYQQHPGKAPKLMIYEVSNRPSGVSNRFSGSKSGNTASLTISGLQAEDEADYYCSSYTSSSSYVFGTGTKVTVL

SEQ ID NO: 13141 - protein, 98 aa, Homo sapiens
QSALTQPASVSGSPGQSITISCTGTSSDVGGYNYVSWYQQHPGKAPKLMIYEVSNRPSGVSNRFSGSKSGNTASLTISGLQAEDEADYYCSSYTSSST

SEQ ID NO: 13142 - protein, 99 aa, Homo sapiens
QSALTQPASVSGSPGQSITISCTGTSSDVGGYNYVSWYQQHPGKAPKLMIYEVSNRPSGVSNRFSGSKSGNTASLTISGLQAEDEADYYCSSYTSSSTL

SEQ ID NO: 13143 - protein, 110 aa, Homo sapiens
QSALTQPASVSGSPGQSITISCTGTSSDVGGYNYVSWYQQHPGKAPKLMIYEVSNRPSGVSNRFSGSKSGNTASLTISGLQAEDEADYYCSSYTSSSTLVFGGGTKLTVL

SEQ ID NO: 13144 - protein, 110 aa, Homo sapiens
QSALTQPASVSGSPGQSITISCTGTSSDVGGYNYVSWYQQHPGKAPKLMIYEVSNRPSGVSNRFSGSKSGNTASLTISGLQAEDEADYYCSSYTSSSTWVFGGGTKLTVL

SEQ ID NO: 13145 - protein, 98 aa, Homo sapiens
QSALTQPASVSGSPGQSITISCTGTSSDVGGYNYVSWYQQHPGKAPKLMIYEVTNRPSGVSNRFSGSKSGNTASLTISGLQAEDEADYYCSSYTSTST

SEQ ID NO: 13146 - protein, 110 aa, Homo sapiens
QSALTQPASVSGSPGQSITISCTGTSSDVGGYNYVSWYQQHPGKAPKLMIYEVTNRPSGVSNRFSGSKSGNTASLTISGLQAEDEADYYCSSYTSTSTFVFGTGTKVTVL

SEQ ID NO: 13147 - protein, 98 aa, Homo sapiens
QSALTQPASVSGSPGQSITISCTGTSSDVGGYNYVSWYQQHPGRVPKLIIYGVNNRPSGVSNRFSGSKSGNTASLTISGLQAEDEADYYCGSYSRSGT

SEQ ID NO: 13148 - protein, 110 aa, Homo sapiens
QSALTQPASVSGSPGQSITISCTGTSSDVGGYNYVSWYQQHPGRVPKLIIYGVNNRPSGVSNRFSGSKSGNTASLTISGLQAEDEADYYCGSYSRSGTFVFGVGTTVTAL

SEQ ID NO: 13149 - protein, 98 aa, Homo sapiens
QSALTQPASVSGSPGQSITISCTGTSSDVGGYNYVSWYQQRPGKAPKLIIYEVTNRPSGVSNRFSGSKSGNTASLTISGLQAEDEAHYYCCSYTRSST

SEQ ID NO: 13150 - protein, 110 aa, Homo sapiens
QSALTQPASVSGSPGQSITISCTGTSSDVGGYNYVSWYQQRPGKAPKLIIYEVTNRPSGVSNRFSGSKSGNTASLTISGLQAEDEAHYYCCSYTRSSTFLFGTGTEVTVL

SEQ ID NO: 13151 - protein, 98 aa, Homo sapiens
QSALTQPASVSGSPGQSITISCTGTSSDVGGYNYVSWYQQRPGKAPKLMIYEVTNRPSGVSNRFSGSKSGDTASLTISGLQAEDEGHYYCCSYTRSST

SEQ ID NO: 13152 - protein, 110 aa, Homo sapiens
QSALTQPASVSGSPGQSITISCTGTSSDVGGYNYVSWYQQRPGKAPKLMIYEVTNRPSGVSNRFSGSKSGDTASLTISGLQAEDEGHYYCCSYTRSSTFLFGTGTEVTVL

SEQ ID NO: 13153 - protein, 98 aa, Homo sapiens
QSALTQPASVSGSPGQSITISCTGTSSDVGGYNYVSWYQQRPGKAPKLMIYEVTNRPSGVSNRFSGSKSGNTASLTISGLQAEDEAHYYCCSYTRSST

SEQ ID NO: 13154 - protein, 110 aa, Homo sapiens
QSALTQPASVSGSPGQSITISCTGTSSDVGGYNYVSWYQQRPGKAPKLMIYEVTNRPSGVSNRFSGSKSGNTASLTISGLQAEDEAHYYCCSYTRSSTFLFGTGTEVTVL

SEQ ID NO: 13155 - protein, 98 aa, Homo sapiens
QSALTQPASVSGSPGQSITISCTGTSSDVGGYNYVSWYQQYPGKAPKLMIYEVSNRPSGVSNRFSGSKSGNTASLTVSGLQPEDEADYYCSSYTSSIT

SEQ ID NO: 13156 - protein, 110 aa, Homo sapiens
QSALTQPASVSGSPGQSITISCTGTSSDVGGYNYVSWYQQYPGKAPKLMIYEVSNRPSGVSNRFSGSKSGNTASLTVSGLQPEDEADYYCSSYTSSITYVFGTGTTVTVL

SEQ ID NO: 13157 - protein, 96 aa, Homo sapiens
QSALTQPASVSGSPGQSITISCTGTSSDVGNYNLVSWYQHHPGKAPKLIIYEGSKRPSGVSNRFSGSKSGNTASLTISGLQAEDEAAYYCCSYAGS

SEQ ID NO: 13158 - protein, 110 aa, Homo sapiens
QSALTQPASVSGSPGQSITISCTGTSSDVGNYNLVSWYQHHPGKAPKLIIYEGSKRPSGVSNRFSGSKSGNTASLTISGLQAEDEAAYYCCSYAGSSSGVFGGGTKLTVL

SEQ ID NO: 13159 - protein, 98 aa, Homo sapiens
QSALTQPASVSGSPGQSITISCTGTSSDVGNYNLVSWYQQHPGKVPKLMIYDVGKRPSGVSNRFSGSKSGNTASLTISGLQAEDEADYYCCSYAGSDT

SEQ ID NO: 13160 - protein, 110 aa, Homo sapiens
QSALTQPASVSGSPGQSITISCTGTSSDVGNYNLVSWYQQHPGKVPKLMIYDVGKRPSGVSNRFSGSKSGNTASLTISGLQAEDEADYYCCSYAGSDTWVFGGGTKLTVL

SEQ ID NO: 13161 - protein, 98 aa, Homo sapiens
QSALTQPASVSGSPGQSITISCTGTSSDVGRYKFVSWYQQHPGKAPKVMIFEVTKRPSGVSDRFSGSKSANTASLTISGLQAEDEADYYCLSYAGSSN

SEQ ID NO: 13162 - protein, 110 aa, Homo sapiens
QSALTQPASVSGSPGQSITISCTGTSSDVGRYKFVSWYQQHPGKAPKVMIFEVTKRPSGVSDRFSGSKSANTASLTISGLQAEDEADYYCLSYAGSSNWVFGGGTRLTVL

SEQ ID NO: 13163 - protein, 98 aa, Homo sapiens
QSALTQPASVSGSPGQSITISCTGTSSDVGSYKFVSWYQQHPGKAPKVMIFEVTKRPSGVSDRFSGSKSANTASLTISGLQAEDEADYYCFSYAGSST

SEQ ID NO: 13164 - protein, 110 aa, Homo sapiens
QSALTQPASVSGSPGQSITISCTGTSSDVGSYKFVSWYQQHPGKAPKVMIFEVTKRPSGVSDRFSGSKSANTASLTISGLQAEDEADYYCFSYAGSSTWVFGGGTRLTVL

SEQ ID NO: 13165 - protein, 98 aa, Homo sapiens
QSALTQPASVSGSPGQSITISCTGTSSDVGSYNLVSWYQQDPGKAPKLMIYEVSKRPSGISNRFSGSKSGNTASLTISGLQAEDEADYYCCSNARSGT

SEQ ID NO: 13166 - protein, 110 aa, Homo sapiens
QSALTQPASVSGSPGQSITISCTGTSSDVGSYNLVSWYQQDPGKAPKLMIYEVSKRPSGISNRFSGSKSGNTASLTISGLQAEDEADYYCCSNARSGTWVFGGGTKLTVL

SEQ ID NO: 13167 - protein, 98 aa, Homo sapiens
QSALTQPASVSGSPGQSITISCTGTSSDVGSYNLVSWYQQHPGKAPKLMIYDVSKRPSGVSTRFSGSKSGNTASLTISGLQAEDEADYYCCSYARSST

SEQ ID NO: 13168 - protein, 110 aa, Homo sapiens
QSALTQPASVSGSPGQSITISCTGTSSDVGSYNLVSWYQQHPGKAPKLMIYDVSKRPSGVSTRFSGSKSGNTASLTISGLQAEDEADYYCCSYARSSTWVFGGGTKLTVL

SEQ ID NO: 13169 - protein, 98 aa, Homo sapiens
QSALTQPASVSGSPGQSITISCTGTSSDVGSYNLVSWYQQHPGKAPKLMIYEGSKRPSGVSNRFSGSKSGNTASLTISGLQAEDEADYYCCSYAGSST

SEQ ID NO: 13170 - protein, 111 aa, Homo sapiens
QSALTQPASVSGSPGQSITISCTGTSSDVGSYNLVSWYQQHPGKAPKLMIYEGSKRPSGVSNRFSGSKSGNTASLTISGLQAEDEADYYCCSYAGSSTDVVFGGGTKLTVL

SEQ ID NO: 13171 - protein, 99 aa, Homo sapiens
QSALTQPASVSGSPGQSITISCTGTSSDVGSYNLVSWYQQHPGKAPKLMIYEGSKRPSGVSNRFSGSKSGNTASLTISGLQAEDEADYYCCSYAGSSTF

SEQ ID NO: 13172 - protein, 114 aa, Homo sapiens
QSALTQPASVSGSPGQSITISCTGTSSDVGSYNLVSWYQQHPGKAPKLMIYEGSKRPSGVSNRFSGSKSGNTASLTISGLQAEDEADYYCCSYAGSSTFAHNYVFGTGTKVTVL

SEQ ID NO: 13173 - protein, 98 aa, Homo sapiens
QSALTQPASVSGSPGQSITISCTGTSSDVGSYNLVSWYQQHPGKAPKLMIYEGSKRPSGVSNRFSGSKSGNTASLTISGLQAEDEGDYYCSSYVHSST

SEQ ID NO: 13174 - protein, 111 aa, Homo sapiens
QSALTQPASVSGSPGQSITISCTGTSSDVGSYNLVSWYQQHPGKAPKLMIYEGSKRPSGVSNRFSGSKSGNTASLTISGLQAEDEGDYYCSSYVHSSTSWVFGGGTKLTVL

SEQ ID NO: 13175 - protein, 96 aa, Homo sapiens
QSALTQPASVSGSPGQSITISCTGTSSDVGSYNLVSWYQQHPGKAPKLMIYEVSKRPSGVSNRFSGSKSGNTASLTISGLQAEDEADYYCCSYAGS

SEQ ID NO: 13176 - protein, 108 aa, Homo sapiens
QSALTQPASVSGSPGQSITISCTGTSSDVGSYNLVSWYQQHPGKAPKLMIYEVSKRPSGVSNRFSGSKSGNTASLTISGLQAEDEADYYCCSYAGSWVFGGGTKLTVL

SEQ ID NO: 13177 - protein, 98 aa, Homo sapiens
QSALTQPASVSGSPGQSITISCTGTSSDVGSYNLVSWYQQHPGKAPKLMIYEVSKRPSGVSNRFSGSKSGNTASLTISGLQAEDEANYYCCSYVAIST

SEQ ID NO: 13178 - protein, 110 aa, Homo sapiens
QSALTQPASVSGSPGQSITISCTGTSSDVGSYNLVSWYQQHPGKAPKLMIYEVSKRPSGVSNRFSGSKSGNTASLTISGLQAEDEANYYCCSYVAISTLVFGGGTKLTVL

SEQ ID NO: 13179 - protein, 96 aa, Homo sapiens
QSALTQPASVSGSPGQSITISCTGTSSDVGSYNLVSWYQQHPGKAPKLMIYEVTQRPSGVSNRFSGSKSDNTASLTISGLQAEDEAYYYCCSYAGS

SEQ ID NO: 13180 - protein, 109 aa, Homo sapiens
QSALTQPASVSGSPGQSITISCTGTSSDVGSYNLVSWYQQHPGKAPKLMIYEVTQRPSGVSNRFSGSKSDNTASLTISGLQAEDEAYYYCCSYAGSSARFGGGTKLTVL

SEQ ID NO: 13181 - protein, 99 aa, Homo sapiens
QSALTQPASVSGSPGQSITISCTGTSSDVGSYNLVSWYQQYPGKAPKLMIYEVSKRPSGVSNRFSGSKSGNTASLTISGLQAEDEADYYCSSYAGSRTF

SEQ ID NO: 13182 - protein, 112 aa, Homo sapiens
QSALTQPASVSGSPGQSITISCTGTSSDVGSYNLVSWYQQYPGKAPKLMIYEVSKRPSGVSNRFSGSKSGNTASLTISGLQAEDEADYYCSSYAGSRTFPYVFGGGTKVIVL

SEQ ID NO: 13183 - protein, 98 aa, Homo sapiens
QSALTQPASVSGSPGQSITISCTGTSSDVGTFNLVSWYQQHPGKAPKLMIYEVTKRPSGVSNRFSASKSGNTASLTISGLQTADEADFYCCSYAGSDT

SEQ ID NO: 13184 - protein, 110 aa, Homo sapiens
QSALTQPASVSGSPGQSITISCTGTSSDVGTFNLVSWYQQHPGKAPKLMIYEVTKRPSGVSNRFSASKSGNTASLTISGLQTADEADFYCCSYAGSDTWVFGGGTKLTVL

SEQ ID NO: 13185 - protein, 98 aa, Homo sapiens
QSALTQPASVSGSPGQSITISCTGTSSDVGTYKLVSWYQHHPGKAPKLMIYEDNKRPSGVSNRFSGSKSGNTASLTISGLQAEDEANYYCCSYAGRRS

SEQ ID NO: 13186 - protein, 110 aa, Homo sapiens
QSALTQPASVSGSPGQSITISCTGTSSDVGTYKLVSWYQHHPGKAPKLMIYEDNKRPSGVSNRFSGSKSGNTASLTISGLQAEDEANYYCCSYAGRRSWVFGGGTTLTVL

SEQ ID NO: 13187 - protein, 98 aa, Homo sapiens
QSALTQPASVSGSPGQSITISCTGTSSDVGTYNLVSWYQQHPGKAPKLMIYEVSKRPSGVSNRFSGSKSGNTASLTISGLQAEDEADYYCCSNARSGT

SEQ ID NO: 13188 - protein, 110 aa, Homo sapiens
QSALTQPASVSGSPGQSITISCTGTSSDVGTYNLVSWYQQHPGKAPKLMIYEVSKRPSGVSNRFSGSKSGNTASLTISGLQAEDEADYYCCSNARSGTWVFGGGTKLTVL

SEQ ID NO: 13189 - protein, 98 aa, Homo sapiens
QSALTQPASVSGSPGQSITISCTGTSSDVGTYNYVSWYQQHPDKAPKLVIYDVSNRPSGVSNRFSGSKSGNTASLTISGLQTEDEADYYCSSYTSSTT

SEQ ID NO: 13190 - protein, 110 aa, Homo sapiens
QSALTQPASVSGSPGQSITISCTGTSSDVGTYNYVSWYQQHPDKAPKLVIYDVSNRPSGVSNRFSGSKSGNTASLTISGLQTEDEADYYCSSYTSSTTVVFGGGTKLTVL

SEQ ID NO: 13191 - protein, 97 aa, Homo sapiens
QSALTQPASVSGSPGQSITISCTGTSSDVRSYNYVSWYQQHPGKAPKLVIYDVSDRPSGVSNRFSGSRSGNTASLTISGLQAEDEADYYCSSYRDSN

SEQ ID NO: 13192 - protein, 111 aa, Homo sapiens
QSALTQPASVSGSPGQSITISCTGTSSDVRSYNYVSWYQQHPGKAPKLVIYDVSDRPSGVSNRFSGSRSGNTASLTISGLQAEDEADYYCSSYRDSNSVVMFGGGTKLAVL

SEQ ID NO: 13193 - protein, 97 aa, Homo sapiens
QSALTQPASVSGSPGQSITISCTGTSSDVVDYNYVSWYQQHPDKAPKLIIYDVNNRPSGVSNRFSASKSANTASLTISGLQAEDEADYYCSSYTTNN

SEQ ID NO: 13194 - protein, 110 aa, Homo sapiens
QSALTQPASVSGSPGQSITISCTGTSSDVVDYNYVSWYQQHPDKAPKLIIYDVNNRPSGVSNRFSASKSANTASLTISGLQAEDEADYYCSSYTTNNNWVFGGGTKLTVL

SEQ ID NO: 13195 - protein, 95 aa, Homo sapiens
QSALTQPASVSGSPGQSITISCTGTSSGVGSDNLVSWYQQHPGKAPKLMIFEGSKRPSGVSNRFSGSKSGTTASLTISGLQADDEAAYYCCSYVR

SEQ ID NO: 13196 - protein, 111 aa, Homo sapiens
QSALTQPASVSGSPGQSITISCTGTSSGVGSDNLVSWYQQHPGKAPKLMIFEGSKRPSGVSNRFSGSKSGTTASLTISGLQADDEAAYYCCSYVRISSIVLFGGGTKVTVL

SEQ ID NO: 13197 - protein, 98 aa, Homo sapiens
QSALTQPASVSGSPGQSITISCTGTSSNVGGYNLVSWYQQHPGKAPKLMIYEGSHRPSGVSNRFSGSQSGNTASLTISGLQAEDEADYYCCSYGDTTT

SEQ ID NO: 13198 - protein, 111 aa, Homo sapiens
QSALTQPASVSGSPGQSITISCTGTSSNVGGYNLVSWYQQHPGKAPKLMIYEGSHRPSGVSNRFSGSQSGNTASLTISGLQAEDEADYYCCSYGDTTTPYVFGIGTTVTVL

SEQ ID NO: 13199 - protein, 98 aa, Homo sapiens
QSALTQPASVSGSPGQSITISCTGTSTDVGASDSVSWYQQHPPKAPKLMIYDVDKRPSGVSNRFSGSKSGNTASLTISGLQAEDEADYYCSSYTRRTT

SEQ ID NO: 13200 - protein, 111 aa, Homo sapiens
QSALTQPASVSGSPGQSITISCTGTSTDVGASDSVSWYQQHPPKAPKLMIYDVDKRPSGVSNRFSGSKSGNTASLTISGLQAEDEADYYCSSYTRRTTPYVFGTGTKVTVL

SEQ ID NO: 13201 - protein, 98 aa, Homo sapiens
QSALTQPASVSGSPGQSITISCTGTTSDVGRYNYVSWYQQRPGKAPKLMIYEVTNRPSGVSTRFSGSKSGNTASLTISGLQAEDEGLYHCCSYTSSST

SEQ ID NO: 13202 - protein, 110 aa, Homo sapiens
QSALTQPASVSGSPGQSITISCTGTTSDVGRYNYVSWYQQRPGKAPKLMIYEVTNRPSGVSTRFSGSKSGNTASLTISGLQAEDEGLYHCCSYTSSSTFLFGTGTEVTVL

SEQ ID NO: 13203 - protein, 99 aa, Homo sapiens
QSALTQPASVSGSPGQSITIYCTGTSSDVGGYNYVSWYRQHPGKAPQLMIYDVSYRPSGVSNRFSGSRSGNTASLTISGLQAEDEADYYCSSYTSSSSL

SEQ ID NO: 13204 - protein, 111 aa, Homo sapiens
QSALTQPASVSGSPGQSITIYCTGTSSDVGGYNYVSWYRQHPGKAPQLMIYDVSYRPSGVSNRFSGSRSGNTASLTISGLQAEDEADYYCSSYTSSSSLGIFGGGTKLTVL

SEQ ID NO: 13205 - protein, 98 aa, Homo sapiens
QSALTQPASVSGSPGQSLTISCTGTSSDVGAYKYVSWYQQHPGRAPKVMIYDVSKRPSGVSNRFSGSKSGNTASLTISGLQAEDEGDYYCSSYTSSST

SEQ ID NO: 13206 - protein, 110 aa, Homo sapiens
QSALTQPASVSGSPGQSLTISCTGTSSDVGAYKYVSWYQQHPGRAPKVMIYDVSKRPSGVSNRFSGSKSGNTASLTISGLQAEDEGDYYCSSYTSSSTLVFGGGTKLTVL

SEQ ID NO: 13207 - protein, 98 aa, Homo sapiens
QSALTQPASVSGSPGQSVTISCTGTTNDVGGYNYVSWYRQSPGKAPKLIIYEVTYRPSGVSNRFSGSKSGNTASLTISGLQAEDEGHYYCCSYTRAST

SEQ ID NO: 13208 - protein, 110 aa, Homo sapiens
QSALTQPASVSGSPGQSVTISCTGTTNDVGGYNYVSWYRQSPGKAPKLIIYEVTYRPSGVSNRFSGSKSGNTASLTISGLQAEDEGHYYCCSYTRASTFLFGTGTEVTVL

SEQ ID NO: 13209 - protein, 98 aa, Homo sapiens
QSALTQPASVSGTPGQSITISCTGTSSDVGSFNLVSWYQQHPGKVPKLMIYDVGKRPSGVSNRFSGSKSGNTASLTISGLQAEDEADYYCCSYVHSDT

SEQ ID NO: 13210 - protein, 110 aa, Homo sapiens
QSALTQPASVSGTPGQSITISCTGTSSDVGSFNLVSWYQQHPGKVPKLMIYDVGKRPSGVSNRFSGSKSGNTASLTISGLQAEDEADYYCCSYVHSDTWVFGGGTKLTVL

SEQ ID NO: 13211 - protein, 99 aa, Homo sapiens
QSALTQPAYVSGSPGQSITISCTGTSSDVGGYNSVSWYQQYPGKAPKLLIYEVTKRPSGVPDRFSGSKSGNTASLTISGLQAEDEADYYCSSYTSSVSL

SEQ ID NO: 13212 - protein, 111 aa, Homo sapiens
QSALTQPAYVSGSPGQSITISCTGTSSDVGGYNSVSWYQQYPGKAPKLLIYEVTKRPSGVPDRFSGSKSGNTASLTISGLQAEDEADYYCSSYTSSVSLDVFGTGTKVTVL

SEQ ID NO: 13213 - protein, 96 aa, Homo sapiens
QSALTQPPSASGSLGQSVTISCAGTSSDVGSSDSVSWYQQHLGKVPKIIIYDVTRRPSGVPDRFSGSKSGNTASLTVSGLQAEDEADYYCSSYVVS

SEQ ID NO: 13214 - protein, 112 aa, Homo sapiens
QSALTQPPSASGSLGQSVTISCAGTSSDVGSSDSVSWYQQHLGKVPKIIIYDVTRRPSGVPDRFSGSKSGNTASLTVSGLQAEDEADYYCSSYVVSRRSRPVFGTGTKVTVL

SEQ ID NO: 13215 - protein, 95 aa, Homo sapiens
QSALTQPPSASGSLGQSVTISCTGTTSDVGAYDRVSWYQHHPDKAPKLMIYEVSKRPSGVPDRFSGSKSVNTASLTVSGLQAEDEADYYCSSYAG

SEQ ID NO: 13216 - protein, 109 aa, Homo sapiens
QSALTQPPSASGSLGQSVTISCTGTTSDVGAYDRVSWYQHHPDKAPKLMIYEVSKRPSGVPDRFSGSKSVNTASLTVSGLQAEDEADYYCSSYAGNSWVFGGGTKVTVL

SEQ ID NO: 13217 - protein, 98 aa, Homo sapiens
QSALTQPPSASGSPGQSVSISCTGTSSDVGYYNYVSWYQQYPGKAPKLIISEVSRRPSGVPDRFSGSKSGNTASLTVSGLLPEDEADYYCTSYGGSNN

SEQ ID NO: 13218 - protein, 110 aa, Homo sapiens
QSALTQPPSASGSPGQSVSISCTGTSSDVGYYNYVSWYQQYPGKAPKLIISEVSRRPSGVPDRFSGSKSGNTASLTVSGLLPEDEADYYCTSYGGSNNWVFGGGTKLTVL

SEQ ID NO: 13219 - protein, 98 aa, Homo sapiens
QSALTQPPSASGSPGQSVTFSCTGTSSDVGAYNYVSWYQQHPGKAPKLMIYEVSKRPSGVPDRFSGSKSGNTASLTVAGLQAEDEADYYCSSYVGRNN

SEQ ID NO: 13220 - protein, 110 aa, Homo sapiens
QSALTQPPSASGSPGQSVTFSCTGTSSDVGAYNYVSWYQQHPGKAPKLMIYEVSKRPSGVPDRFSGSKSGNTASLTVAGLQAEDEADYYCSSYVGRNNLVFGGGTKLTVL

SEQ ID NO: 13221 - protein, 98 aa, Homo sapiens
QSALTQPPSASGSPGQSVTISCSGTSSDVGGYNYVSWYQQHPGQAPKLMIYEVSERPSGVPDRFSGSKSGNTASLTVSGLQAEDEADYYCSSYAGSNN

SEQ ID NO: 13222 - protein, 109 aa, Homo sapiens
QSALTQPPSASGSPGQSVTISCSGTSSDVGGYNYVSWYQQHPGQAPKLMIYEVSERPSGVPDRFSGSKSGNTASLTVSGLQAEDEADYYCSSYAGSNNFVFGTGTKVTV

SEQ ID NO: 13223 - protein, 98 aa, Homo sapiens
QSALTQPPSASGSPGQSVTISCTETSSDVGGRNFVSWYQQHPGKAPKLIIYEDKKRPSGVPDRFSGSKSGNTASLTVSGLQADDEADYYCTSYAGNND

SEQ ID NO: 13224 - protein, 110 aa, Homo sapiens
QSALTQPPSASGSPGQSVTISCTETSSDVGGRNFVSWYQQHPGKAPKLIIYEDKKRPSGVPDRFSGSKSGNTASLTVSGLQADDEADYYCTSYAGNNDQKFGGGTKLTVL

SEQ ID NO: 13225 - protein, 98 aa, Homo sapiens
QSALTQPPSASGSPGQSVTISCTETSSDVGGRNYVSWYQQHPGKAPKLIIYEDKKRPSGVPDRFSGSKSGNTASLTVSGLQADDEADYYCSSYAGSND

SEQ ID NO: 13226 - protein, 110 aa, Homo sapiens
QSALTQPPSASGSPGQSVTISCTETSSDVGGRNYVSWYQQHPGKAPKLIIYEDKKRPSGVPDRFSGSKSGNTASLTVSGLQADDEADYYCSSYAGSNDQKFGGGTKLTVL

SEQ ID NO: 13227 - protein, 98 aa, Homo sapiens
QSALTQPPSASGSPGQSVTISCTETSSDVGGRYYVSWYLQHPGKAPKLLIYEDRKRPSGVPDRFSGSKSGNAASLTVSGLQAEDEADYYCSSYAGSDN

SEQ ID NO: 13228 - protein, 110 aa, Homo sapiens
QSALTQPPSASGSPGQSVTISCTETSSDVGGRYYVSWYLQHPGKAPKLLIYEDRKRPSGVPDRFSGSKSGNAASLTVSGLQAEDEADYYCSSYAGSDNQKFGGGTKLTVL

SEQ ID NO: 13229 - protein, 95 aa, Homo sapiens
QSALTQPPSASGSPGQSVTISCTGSSSDVGRYDYVSWYHQLPGTAPKLIIYEVTQRPSGVPDRFSGSKSGNTASLTVSGLQAEDEGDYFCCSYAG

SEQ ID NO: 13230 - protein, 110 aa, Homo sapiens
QSALTQPPSASGSPGQSVTISCTGSSSDVGRYDYVSWYHQLPGTAPKLIIYEVTQRPSGVPDRFSGSKSGNTASLTVSGLQAEDEGDYFCCSYAGKDTLLFGGGTKLTVL

SEQ ID NO: 13231 - protein, 98 aa, Homo sapiens
QSALTQPPSASGSPGQSVTISCTGTHNDVGGFNYVSWYQQHPGKAPKLIIYEVGERPSGVPDRFSGSKSGNTASLTVTGLQADDEATYFCCSFAGSNN

SEQ ID NO: 13232 - protein, 110 aa, Homo sapiens
QSALTQPPSASGSPGQSVTISCTGTHNDVGGFNYVSWYQQHPGKAPKLIIYEVGERPSGVPDRFSGSKSGNTASLTVTGLQADDEATYFCCSFAGSNNLLFGGGTRLTVL

SEQ ID NO: 13233 - protein, 98 aa, Homo sapiens
QSALTQPPSASGSPGQSVTISCTGTNSDIGAYNFVSWYQQHPGKAPKLIIYDVTKRPSGVPDRFSGSKSGNTASLTVSGLQAEDEADYYCGSYAGSNN

SEQ ID NO: 13234 - protein, 111 aa, Homo sapiens
QSALTQPPSASGSPGQSVTISCTGTNSDIGAYNFVSWYQQHPGKAPKLIIYDVTKRPSGVPDRFSGSKSGNTASLTVSGLQAEDEADYYCGSYAGSNNLKVFGGGTKLTVL

SEQ ID NO: 13235 - protein, 97 aa, Homo sapiens
QSALTQPPSASGSPGQSVTISCTGTSNDVGSYNYVSWYQQHPGRAPKLVISEVSQRPSGVPDRFSGSKSGNTASLTVSGLQAEDEAEYYCSSYAGRY

SEQ ID NO: 13236 - protein, 110 aa, Homo sapiens
QSALTQPPSASGSPGQSVTISCTGTSNDVGSYNYVSWYQQHPGRAPKLVISEVSQRPSGVPDRFSGSKSGNTASLTVSGLQAEDEAEYYCSSYAGRYTWVFGGGTKLTVL

SEQ ID NO: 13237 - protein, 98 aa, Homo sapiens
QSALTQPPSASGSPGQSVTISCTGTSSDLGGSNYVSWYQQHPGKVPKLILYEVSKRPSGVPDRFSGSKSGNTASLTVSGLQAEDEANYYCSSYGGSNN

SEQ ID NO: 13238 - protein, 110 aa, Homo sapiens
QSALTQPPSASGSPGQSVTISCTGTSSDLGGSNYVSWYQQHPGKVPKLILYEVSKRPSGVPDRFSGSKSGNTASLTVSGLQAEDEANYYCSSYGGSNNLVFGGGTTLTVL

SEQ ID NO: 13239 - protein, 98 aa, Homo sapiens
QSALTQPPSASGSPGQSVTISCTGTSSDVGAYDYVSWYQQHPGKAPRLIIYEVSKRPSGVPDRFSGSKSGNTASLTVSGLQDEDEADYYCSSYAGNNN

SEQ ID NO: 13240 - protein, 110 aa, Homo sapiens
QSALTQPPSASGSPGQSVTISCTGTSSDVGAYDYVSWYQQHPGKAPRLIIYEVSKRPSGVPDRFSGSKSGNTASLTVSGLQDEDEADYYCSSYAGNNNSLFGGGTKVTVL

SEQ ID NO: 13241 - protein, 97 aa, Homo sapiens
QSALTQPPSASGSPGQSVTISCTGTSSDVGDYNYVSWYQQHPGKAPKLMIYEVTKRPSGVPDRFSGSKSGNTASLTVSGLQAEDEADYYCSSYRGGN

SEQ ID NO: 13242 - protein, 110 aa, Homo sapiens
QSALTQPPSASGSPGQSVTISCTGTSSDVGDYNYVSWYQQHPGKAPKLMIYEVTKRPSGVPDRFSGSKSGNTASLTVSGLQAEDEADYYCSSYRGGNSVVFGGGTKLTVL

SEQ ID NO: 13243 - protein, 98 aa, Homo sapiens
QSALTQPPSASGSPGQSVTISCTGTSSDVGGYNFVSWYQQHPGKAPKLIIYEVTKRPSGVPDRFSGSKSGNTASLTVSGLQAEDEADYYCISYAGSNN

SEQ ID NO: 13244 - protein, 110 aa, Homo sapiens
QSALTQPPSASGSPGQSVTISCTGTSSDVGGYNFVSWYQQHPGKAPKLIIYEVTKRPSGVPDRFSGSKSGNTASLTVSGLQAEDEADYYCISYAGSNNLVFGGGTKVTVL

SEQ ID NO: 13245 - protein, 96 aa, Homo sapiens
QSALTQPPSASGSPGQSVTISCTGTSSDVGGYNYVSWYQHHPGKAPKLILYEVSKRPSGVPYRFSGSKSGNTASLTVSGLQADDEADYYCTSYAGS

SEQ ID NO: 13246 - protein, 110 aa, Homo sapiens
QSALTQPPSASGSPGQSVTISCTGTSSDVGGYNYVSWYQHHPGKAPKLILYEVSKRPSGVPYRFSGSKSGNTASLTVSGLQADDEADYYCTSYAGSNTLISGGGTRLAVL

SEQ ID NO: 13247 - protein, 98 aa, Homo sapiens
QSALTQPPSASGSPGQSVTISCTGTSSDVGGYNYVSWYQQHPGKAPKLIIYEVTKRPSGVPDRFIGSKSGNTASLTVSGLQAEDEADYYCSSYADNNN

SEQ ID NO: 13248 - protein, 110 aa, Homo sapiens
QSALTQPPSASGSPGQSVTISCTGTSSDVGGYNYVSWYQQHPGKAPKLIIYEVTKRPSGVPDRFIGSKSGNTASLTVSGLQAEDEADYYCSSYADNNNPGFGTGTKVTVL

SEQ ID NO: 13249 - protein, 98 aa, Homo sapiens
QSALTQPPSASGSPGQSVTISCTGTSSDVGGYNYVSWYQQHPGKAPKLMIYDVSNRPSGVSNRFSGSKSGNTASLTVSGLQAEDEADYYCSSYAGSNS

SEQ ID NO: 13250 - protein, 110 aa, Homo sapiens
QSALTQPPSASGSPGQSVTISCTGTSSDVGGYNYVSWYQQHPGKAPKLMIYDVSNRPSGVSNRFSGSKSGNTASLTVSGLQAEDEADYYCSSYAGSNSWVFGGGTKLTVL

SEQ ID NO: 13251 - protein, 98 aa, Homo sapiens
QSALTQPPSASGSPGQSVTISCTGTSSDVGGYNYVSWYQQHPGKAPKLMIYEVSKRPSGVPDRFSGSKSGNTASLTVSGLQAEDEADYYCSSYAGSNN

SEQ ID NO: 13252 - protein, 112 aa, Homo sapiens
QSALTQPPSASGSPGQSVTISCTGTSSDVGGYNYVSWYQQHPGKAPKLMIYEVSKRPSGVPDRFSGSKSGNTASLTVSGLQAEDEADYYCSSYAGSNNLRYVFGTGTKVTVL

SEQ ID NO: 13253 - protein, 95 aa, Homo sapiens
QSALTQPPSASGSPGQSVTISCTGTSSDVGGYNYVSWYQQHPGKAPKLMIYEVTKRPSGVPDRFSGSKSGNTASLTVSGLQAEDEADYYCSSYAG

SEQ ID NO: 13254 - protein, 109 aa, Homo sapiens
QSALTQPPSASGSPGQSVTISCTGTSSDVGGYNYVSWYQQHPGKAPKLMIYEVTKRPSGVPDRFSGSKSGNTASLTVSGLQAEDEADYYCSSYAGRRWVFGGGTKLTVL

SEQ ID NO: 13255 - protein, 98 aa, Homo sapiens
QSALTQPPSASGSPGQSVTISCTGTSSDVGGYNYVSWYQQHPGKAPKLMIYEVTKRPSGVPDRFSGSKSGNTASLTVSGLQAEDEADYYCSSYAGSNN

SEQ ID NO: 13256 - protein, 110 aa, Homo sapiens
QSALTQPPSASGSPGQSVTISCTGTSSDVGGYNYVSWYQQHPGKAPKLMIYEVTKRPSGVPDRFSGSKSGNTASLTVSGLQAEDEADYYCSSYAGSNNWVFGGGTKLTVL

SEQ ID NO: 13257 - protein, 98 aa, Homo sapiens
QSALTQPPSASGSPGQSVTISCTGTSSDVGGYNYVSWYQQHPGKAPKVIIYEVSKRTSGVPDRFSGSKSGNTASLTVSGLQAEDEVDYYCSSYAGNNN

SEQ ID NO: 13258 - protein, 110 aa, Homo sapiens
QSALTQPPSASGSPGQSVTISCTGTSSDVGGYNYVSWYQQHPGKAPKVIIYEVSKRTSGVPDRFSGSKSGNTASLTVSGLQAEDEVDYYCSSYAGNNNWVFGGGTKLTVL

SEQ ID NO: 13259 - protein, 99 aa, Homo sapiens
QSALTQPPSASGSPGQSVTISCTGTSSDVGGYNYVSWYQQRPGKAPKLMIYEVTNRPSGVSNRFSGSKSGNTASLTVSGLQAEDEADYYCSSFAGTNNF

SEQ ID NO: 13260 - protein, 113 aa, Homo sapiens
QSALTQPPSASGSPGQSVTISCTGTSSDVGGYNYVSWYQQRPGKAPKLMIYEVTNRPSGVSNRFSGSKSGNTASLTVSGLQAEDEADYYCSSFAGTNNFAFYVFGTGTKVTVL

SEQ ID NO: 13261 - protein, 97 aa, Homo sapiens
QSALTQPPSASGSPGQSVTISCTGTSSDVGNYNYVSWYQQYPGKAPKLLIYEVTKRPSGVPDRFSGSKSGNTASLTVSGLQAEDEADYYCSSYSGSN

SEQ ID NO: 13262 - protein, 111 aa, Homo sapiens
QSALTQPPSASGSPGQSVTISCTGTSSDVGNYNYVSWYQQYPGKAPKLLIYEVTKRPSGVPDRFSGSKSGNTASLTVSGLQAEDEADYYCSSYSGSNNPYVFGTGTKVTVL

SEQ ID NO: 13263 - protein, 97 aa, Homo sapiens
QSALTQPPSASGSPGQSVTISCTGTSSDVGTYNYVSWYQQHPGKAPKLMICEVSKRPSGVPDRFSGSKSGNTASLTVSGLQAEDEADYYCSSYAGSN

SEQ ID NO: 13264 - protein, 111 aa, Homo sapiens
QSALTQPPSASGSPGQSVTISCTGTSSDVGTYNYVSWYQQHPGKAPKLMICEVSKRPSGVPDRFSGSKSGNTASLTVSGLQAEDEADYYCSSYAGSNNLVVFGGGTKLTVL

SEQ ID NO: 13265 - protein, 97 aa, Homo sapiens
QSALTQPPSVSGSPGQSVAISCTGTSTDVGNYNRVSWYQQPPGTAPKLIIYEVTNRPSGVPDRFSGSKSGNTASLTISGLQAEDEADYYCSSFTSSS

SEQ ID NO: 13266 - protein, 111 aa, Homo sapiens
QSALTQPPSVSGSPGQSVAISCTGTSTDVGNYNRVSWYQQPPGTAPKLIIYEVTNRPSGVPDRFSGSKSGNTASLTISGLQAEDEADYYCSSFTSSSSTRYVFGTGTKVTV

SEQ ID NO: 13267 - protein, 97 aa, Homo sapiens
QSALTQPPSVSGSPGQSVTISCTGTSSDVGSYNRVSWYQQPPGTAPKLMIYEVSNRPSGVPDRFSGSKSGNTASLTISGLQAEDEADYYCSSYTSSS

SEQ ID NO: 13268 - protein, 110 aa, Homo sapiens
QSALTQPPSVSGSPGQSVTISCTGTSSDVGSYNRVSWYQQPPGTAPKLMIYEVSNRPSGVPDRFSGSKSGNTASLTISGLQAEDEADYYCSSYTSSSNVVFGGGTKLTVL

SEQ ID NO: 13269 - protein, 97 aa, Homo sapiens
QSALTQPPSVSGTPGQRVIISCSGSSSNIGTNTVNWYQQLPGTAPKLLIYSNNQWPSGVPDRFSGSKSDTSASLAISGLQSEDEADYYCAAWDDSLN

SEQ ID NO: 13270 - protein, 110 aa, Homo sapiens
QSALTQPPSVSGTPGQRVIISCSGSSSNIGTNTVNWYQQLPGTAPKLLIYSNNQWPSGVPDRFSGSKSDTSASLAISGLQSEDEADYYCAAWDDSLNAWVFGGGTKVTVL

SEQ ID NO: 13271 - protein, 96 aa, Homo sapiens
QSALTQPRAVSGSPGQSVTISCTGTSSDVGGYNYVSWYQQHPGKAPKVMIYDVSKRPLGVPDRFSGSKSGNTASLTISGLQADDEADYYCCSYAGS

SEQ ID NO: 13272 - protein, 110 aa, Homo sapiens
QSALTQPRAVSGSPGQSVTISCTGTSSDVGGYNYVSWYQQHPGKAPKVMIYDVSKRPLGVPDRFSGSKSGNTASLTISGLQADDEADYYCCSYAGSPHYVFGGGTKVTVL

SEQ ID NO: 13273 - protein, 98 aa, Homo sapiens
QSALTQPRSVSESPGQSVTISCTGTSSNVGRYDYVSWYQQHPGKAPKLIIYNVNKWPSGVPDRFSGSKSGNTASLTISGLQAEDEADYYCCSYAGSYS

SEQ ID NO: 13274 - protein, 110 aa, Homo sapiens
QSALTQPRSVSESPGQSVTISCTGTSSNVGRYDYVSWYQQHPGKAPKLIIYNVNKWPSGVPDRFSGSKSGNTASLTISGLQAEDEADYYCCSYAGSYSFVFGTGTKVTVL

SEQ ID NO: 13275 - protein, 98 aa, Homo sapiens
QSALTQPRSVSGSPGQSITISCTGTSSDVGAYNYVSWYQQHPDKAPKFMIYDVNERPSGVPDRFSGSKSGNTASLTISGLQPEDEADYYCCSYAGRYS

SEQ ID NO: 13276 - protein, 110 aa, Homo sapiens
QSALTQPRSVSGSPGQSITISCTGTSSDVGAYNYVSWYQQHPDKAPKFMIYDVNERPSGVPDRFSGSKSGNTASLTISGLQPEDEADYYCCSYAGRYSYVFGTGTKVTVL

SEQ ID NO: 13277 - protein, 98 aa, Homo sapiens
QSALTQPRSVSGSPGQSVTISCAGTSSDVGGYNYVSWYQHHPGKAPKLMIYDVFKRPSGVPDRFSGSKSGNAASLIISGLQAEDEADYYCYSYSGSYT

SEQ ID NO: 13278 - protein, 111 aa, Homo sapiens
QSALTQPRSVSGSPGQSVTISCAGTSSDVGGYNYVSWYQHHPGKAPKLMIYDVFKRPSGVPDRFSGSKSGNAASLIISGLQAEDEADYYCYSYSGSYTFWVFGGGTKLTVL

SEQ ID NO: 13279 - protein, 98 aa, Homo sapiens
QSALTQPRSVSGSPGQSVTISCAGTSSDVGGYNYVSWYQQHPGKAPKLMIDDVSKRPSGVPDRFSGSKSGNTASLTISGLQAEDEADYYCCSYAGSYS

SEQ ID NO: 13280 - protein, 111 aa, Homo sapiens
QSALTQPRSVSGSPGQSVTISCAGTSSDVGGYNYVSWYQQHPGKAPKLMIDDVSKRPSGVPDRFSGSKSGNTASLTISGLQAEDEADYYCCSYAGSYSYWVFGGGTKLTVL

SEQ ID NO: 13281 - protein, 98 aa, Homo sapiens
QSALTQPRSVSGSPGQSVTISCPGTSSDVGGYNYVSWFQQHPGKAPQLIIYDVTRRPSGVPYRFSGSKSGNTASLTISGLQAEDEADYYCCSYVDSDT

SEQ ID NO: 13282 - protein, 110 aa, Homo sapiens
QSALTQPRSVSGSPGQSVTISCPGTSSDVGGYNYVSWFQQHPGKAPQLIIYDVTRRPSGVPYRFSGSKSGNTASLTISGLQAEDEADYYCCSYVDSDTYVFGTGTTVTVL

SEQ ID NO: 13283 - protein, 98 aa, Homo sapiens
QSALTQPRSVSGSPGQSVTISCSGTSGDVGAYNYVSWYQHHPGQAPKLMIYDVIKRPSGIPDRFSGSKSGNTASLTISGLQAEDEADYYCCSYAGSYS

SEQ ID NO: 13284 - protein, 110 aa, Homo sapiens
QSALTQPRSVSGSPGQSVTISCSGTSGDVGAYNYVSWYQHHPGQAPKLMIYDVIKRPSGIPDRFSGSKSGNTASLTISGLQAEDEADYYCCSYAGSYSWVFGGGTKLTVL

SEQ ID NO: 13285 - protein, 99 aa, Homo sapiens
QSALTQPRSVSGSPGQSVTISCTGASSDVGRYDYVSWYQQHPGKAPQLVIFDVNKRPSGVPDRFSGSKSGNTASLTISGLQTEDEADYYCCSYAGRDSF

SEQ ID NO: 13286 - protein, 110 aa, Homo sapiens
QSALTQPRSVSGSPGQSVTISCTGASSDVGRYDYVSWYQQHPGKAPQLVIFDVNKRPSGVPDRFSGSKSGNTASLTISGLQTEDEADYYCCSYAGRDSFVFGTGTKVTVV

SEQ ID NO: 13287 - protein, 98 aa, Homo sapiens
QSALTQPRSVSGSPGQSVTISCTGSSSDIGRYDYVSWYQQHPGKVPKLLIYDVAKRPSGVPDRFSGYKSGNTASLTISGLQADDEADYYCCSYAGRYS

SEQ ID NO: 13288 - protein, 110 aa, Homo sapiens
QSALTQPRSVSGSPGQSVTISCTGSSSDIGRYDYVSWYQQHPGKVPKLLIYDVAKRPSGVPDRFSGYKSGNTASLTISGLQADDEADYYCCSYAGRYSFVFGTGTKVTVL

SEQ ID NO: 13289 - protein, 99 aa, Homo sapiens
QSALTQPRSVSGSPGQSVTISCTGSSSDVGSYNYVSWYRQHPGKAPQLLLSDVNKRPSGVPDRLSGSKSGNTASLTISGLRAEDEGDYYCCSYGGSYNF

SEQ ID NO: 13290 - protein, 110 aa, Homo sapiens
QSALTQPRSVSGSPGQSVTISCTGSSSDVGSYNYVSWYRQHPGKAPQLLLSDVNKRPSGVPDRLSGSKSGNTASLTISGLRAEDEGDYYCCSYGGSYNFAFGGGTTLTVL

SEQ ID NO: 13291 - protein, 98 aa, Homo sapiens
QSALTQPRSVSGSPGQSVTISCTGTSRDVGGYNYVTWYQQHPGKAPKLMIYDVSKWPLGVPDRFSGSKSGNTASLTISGLQAEDEADYYCCSYAGSDT

SEQ ID NO: 13292 - protein, 112 aa, Homo sapiens
QSALTQPRSVSGSPGQSVTISCTGTSRDVGGYNYVTWYQQHPGKAPKLMIYDVSKWPLGVPDRFSGSKSGNTASLTISGLQAEDEADYYCCSYAGSDTYNYVFGTGTKVTVL

SEQ ID NO: 13293 - protein, 95 aa, Homo sapiens
QSALTQPRSVSGSPGQSVTISCTGTSSDFGGYNFVSWYQQHPGKAPKLMIYDVTKRPSGVPDRFSGSKSGNTASLTISGLQAEDEADYYCCSYAG

SEQ ID NO: 13294 - protein, 109 aa, Homo sapiens
QSALTQPRSVSGSPGQSVTISCTGTSSDFGGYNFVSWYQQHPGKAPKLMIYDVTKRPSGVPDRFSGSKSGNTASLTISGLQAEDEADYYCCSYAGNPYVFGTGTKVTVL

SEQ ID NO: 13295 - protein, 98 aa, Homo sapiens
QSALTQPRSVSGSPGQSVTISCTGTSSDIGGYNYVSWYQQHPGKAPKLIIFDVSKRPSTVPDRFSGSKSGNTASLSISGLQAEDEADYHCCSYAGSYT

SEQ ID NO: 13296 - protein, 110 aa, Homo sapiens
QSALTQPRSVSGSPGQSVTISCTGTSSDIGGYNYVSWYQQHPGKAPKLIIFDVSKRPSTVPDRFSGSKSGNTASLSISGLQAEDEADYHCCSYAGSYTYIFGGGTKLTVL

SEQ ID NO: 13297 - protein, 98 aa, Homo sapiens
QSALTQPRSVSGSPGQSVTISCTGTSSDVGAYNYVSWYQQRPGKAPKLIVCGVSKRPSGVPDRFSGSKSGNTASLTISGLQAEDEADYYCCSFAGGFT

SEQ ID NO: 13298 - protein, 110 aa, Homo sapiens
QSALTQPRSVSGSPGQSVTISCTGTSSDVGAYNYVSWYQQRPGKAPKLIVCGVSKRPSGVPDRFSGSKSGNTASLTISGLQAEDEADYYCCSFAGGFTRVFGTGTKVTVL

SEQ ID NO: 13299 - protein, 98 aa, Homo sapiens
QSALTQPRSVSGSPGQSVTISCTGTSSDVGGDNYVSWYQQHPGKAPKLIIYDVSKRPSGVPDRFSGSKSGNTASLTISGLQVEDEADYYCCSFAGSYT

SEQ ID NO: 13300 - protein, 110 aa, Homo sapiens
QSALTQPRSVSGSPGQSVTISCTGTSSDVGGDNYVSWYQQHPGKAPKLIIYDVSKRPSGVPDRFSGSKSGNTASLTISGLQVEDEADYYCCSFAGSYTWVFGGGTKLTVL

SEQ ID NO: 13301 - protein, 98 aa, Homo sapiens
QSALTQPRSVSGSPGQSVTISCTGTSSDVGGYNYVSWYQQHPGKAPKLIIYDVSKRPSGVPDRFSGSKSGNTASLTISGLQAEDEADYYCCSYAGRYT

SEQ ID NO: 13302 - protein, 110 aa, Homo sapiens
QSALTQPRSVSGSPGQSVTISCTGTSSDVGGYNYVSWYQQHPGKAPKLIIYDVSKRPSGVPDRFSGSKSGNTASLTISGLQAEDEADYYCCSYAGRYTLVFGGGTKLTVL

SEQ ID NO: 13303 - protein, 99 aa, Homo sapiens
QSALTQPRSVSGSPGQSVTISCTGTSSDVGGYNYVSWYQQHPGKAPKLMIYDVNKRPSGVPDRFSGSKSGNTASLTISGLQAEDETDYYCSSYAGSHTL

SEQ ID NO: 13304 - protein, 111 aa, Homo sapiens
QSALTQPRSVSGSPGQSVTISCTGTSSDVGGYNYVSWYQQHPGKAPKLMIYDVNKRPSGVPDRFSGSKSGNTASLTISGLQAEDETDYYCSSYAGSHTLVVFGGGTKLTVL

SEQ ID NO: 13305 - protein, 98 aa, Homo sapiens
QSALTQPRSVSGSPGQSVTISCTGTSSDVGGYNYVSWYQQHPGKAPKLMIYDVSKRPSGVPDRFSGSKSGNTASLTISGLQAEDEADYYCCSYAGSYT

SEQ ID NO: 13306 - protein, 99 aa, Homo sapiens
QSALTQPRSVSGSPGQSVTISCTGTSSDVGGYNYVSWYQQHPGKAPKLMIYDVSKRPSGVPDRFSGSKSGNTASLTISGLQAEDEADYYCCSYAGSYTF

SEQ ID NO: 13307 - protein, 111 aa, Homo sapiens
QSALTQPRSVSGSPGQSVTISCTGTSSDVGGYNYVSWYQQHPGKAPKLMIYDVSKRPSGVPDRFSGSKSGNTASLTISGLQAEDEADYYCCSYAGSYTFGVFGGGTKLTVL

SEQ ID NO: 13308 - protein, 110 aa, Homo sapiens
QSALTQPRSVSGSPGQSVTISCTGTSSDVGGYNYVSWYQQHPGKAPKLMIYDVSKRPSGVPDRFSGSKSGNTASLTISGLQAEDEADYYCCSYAGSYTVVFGGGTKLTVL

SEQ ID NO: 13309 - protein, 96 aa, Homo sapiens
QSALTQPRSVSGSPGQSVTISCTGTSSDVGGYNYVSWYQQHPGKAPKLMIYDVSKRPSGVPDRFSGSKSGNTASLTISWLQAEDEADYYCCSYAGR

SEQ ID NO: 13310 - protein, 111 aa, Homo sapiens
QSALTQPRSVSGSPGQSVTISCTGTSSDVGGYNYVSWYQQHPGKAPKLMIYDVSKRPSGVPDRFSGSKSGNTASLTISWLQAEDEADYYCCSYAGRSPLYVFGTGTQVTVV

SEQ ID NO: 13311 - protein, 99 aa, Homo sapiens
QSALTQPRSVSGSPGQSVTISCTGTSSDVGRYDYVSWYQHHPGKAPKLVIYDVNKRPSGVPDRFSGSKSGNTASLTISGLQTEDEADYYCCSYAGRDTF

SEQ ID NO: 13312 - protein, 110 aa, Homo sapiens
QSALTQPRSVSGSPGQSVTISCTGTSSDVGRYDYVSWYQHHPGKAPKLVIYDVNKRPSGVPDRFSGSKSGNTASLTISGLQTEDEADYYCCSYAGRDTFVFGTGTKVTVL

SEQ ID NO: 13313 - protein, 98 aa, Homo sapiens
QSALTQPRSVSGSPGQSVTISCTGTSSDVGRYDYVSWYQQHPGKAPKLMIYDVTKRPSGVPDRFSGSKSGTTASLTISGLQADDEADYYCCSYAGRYS

SEQ ID NO: 13314 - protein, 110 aa, Homo sapiens
QSALTQPRSVSGSPGQSVTISCTGTSSDVGRYDYVSWYQQHPGKAPKLMIYDVTKRPSGVPDRFSGSKSGTTASLTISGLQADDEADYYCCSYAGRYSYVFGSGTEVTVL

SEQ ID NO: 13315 - protein, 99 aa, Homo sapiens
QSALTQPRSVSGSPGQSVTISCTGTSSDVGRYDYVSWYQQHPGKAPKLVIYDVNKRPSGVPDRFSGSKSGNTASLTISGLQTEDEADYYCCSYAGRDTF

SEQ ID NO: 13316 - protein, 110 aa, Homo sapiens
QSALTQPRSVSGSPGQSVTISCTGTSSDVGRYDYVSWYQQHPGKAPKLVIYDVNKRPSGVPDRFSGSKSGNTASLTISGLQTEDEADYYCCSYAGRDTFVFATGTEVTVL

SEQ ID NO: 13317 - protein, 98 aa, Homo sapiens
QSALTQPRSVSGSPGQSVTISCTGTSSDVGTYNSLSWYQQHPGKAPQLIIHDVSKRPSGVPDRFSGSKSGNAASLTISGLQPADEADYYCCSYAGRYN

SEQ ID NO: 13318 - protein, 110 aa, Homo sapiens
QSALTQPRSVSGSPGQSVTISCTGTSSDVGTYNSLSWYQQHPGKAPQLIIHDVSKRPSGVPDRFSGSKSGNAASLTISGLQPADEADYYCCSYAGRYNWVFGGGTKLTVL

SEQ ID NO: 13319 - protein, 98 aa, Homo sapiens
QSALTQPRSVSGSPGQSVTISCTGTSSNVGGYNYVSWYQQHPGKAPKLMILDVSKRPSGVPDRFSGSKSGNTASLTISGLQAEDEADYYCCSYAGSYS

SEQ ID NO: 13320 - protein, 110 aa, Homo sapiens
QSALTQPRSVSGSPGQSVTISCTGTSSNVGGYNYVSWYQQHPGKAPKLMILDVSKRPSGVPDRFSGSKSGNTASLTISGLQAEDEADYYCCSYAGSYSWVFGGGTKLTVL

SEQ ID NO: 13321 - protein, 98 aa, Homo sapiens
QSGLTQPPSASGTPGQRVTISCSGSTSNMGGKTFNWYQQLPGTAPKLLMYGKNQRPSGVPGRFSGSRSGTSASLTISGLQSEDEADYYCAAWDDSLNG

SEQ ID NO: 13322 - protein, 110 aa, Homo sapiens
QSGLTQPPSASGTPGQRVTISCSGSTSNMGGKTFNWYQQLPGTAPKLLMYGKNQRPSGVPGRFSGSRSGTSASLTISGLQSEDEADYYCAAWDDSLNGWVFGGGTRLTVL

SEQ ID NO: 13323 - protein, 11 aa, Homo sapiens
QSHDSTLSAWV

SEQ ID NO: 13324 - protein, 99 aa, Homo sapiens
QSMLTQPPSASGTPGQRVTISCSGSSSNIESNTVNWYQQLPGTAPKLLLYSINKRPSGVPDRFSGSKSGTSASLAISGLHSEDEADYYCAAWDDNLKGP

SEQ ID NO: 13325 - protein, 110 aa, Homo sapiens
QSMLTQPPSASGTPGQRVTISCSGSSSNIESNTVNWYQQLPGTAPKLLLYSINKRPSGVPDRFSGSKSGTSASLAISGLHSEDEADYYCAAWDDNLKGPVFGGGTKLTVL

SEQ ID NO: 13326 - protein, 10 aa, Homo sapiens
QSPGSDTLVV

SEQ ID NO: 13327 - protein, 12 aa, Homo sapiens
QSRDSSADHRWV

SEQ ID NO: 13328 - protein, 12 aa, Homo sapiens
QSRDSSDDHSWV

SEQ ID NO: 13329 - protein, 12 aa, Homo sapiens
QSRDSSVNYRWV

SEQ ID NO: 13330 - protein, 12 aa, Homo sapiens
QSRDSTLNYRWV

SEQ ID NO: 13331 - protein, 11 aa, Homo sapiens
QSSDTSGTIAV

SEQ ID NO: 13332 - protein, 10 aa, Homo sapiens
QSSGNSINWV

SEQ ID NO: 13333 - protein, 17 aa, Homo sapiens
QSSQSVLYSSNNKNYLA

SEQ ID NO: 13334 - protein, 11 aa, Homo sapiens
QSTDSSGTYVV

SEQ ID NO: 13335 - protein, 10 aa, Homo sapiens
QSTDSSGVYV

SEQ ID NO: 13336 - protein, 10 aa, Homo sapiens
QSTDTRGIVV

SEQ ID NO: 13337 - protein, 98 aa, Homo sapiens
QSTLTQPRSVSGSPGQSVTISCTGTSGDVGRYNSLSWYQQYPGKAPKLMIYDVTKRPSGVPDRFSGSRSGNTASLTISGLQAEDESDFYCCSYAGRYT

SEQ ID NO: 13338 - protein, 110 aa, Homo sapiens
QSTLTQPRSVSGSPGQSVTISCTGTSGDVGRYNSLSWYQQYPGKAPKLMIYDVTKRPSGVPDRFSGSRSGNTASLTISGLQAEDESDFYCCSYAGRYTWVFGGGTKVTVL

SEQ ID NO: 13339 - protein, 11 aa, Homo sapiens
QSTSAHSSGRV

SEQ ID NO: 13340 - protein, 97 aa, Homo sapiens
QSVLIQPPAASGTPGQRVTISCSGSSSNIGNNPVNWYQQLPGAAPKLLIYGNNNQRPSGVPDRFSGSKSGTSASLAISGLQSEDEADYYCVAWDDSL

SEQ ID NO: 13341 - protein, 111 aa, Homo sapiens
QSVLIQPPAASGTPGQRVTISCSGSSSNIGNNPVNWYQQLPGAAPKLLIYGNNNQRPSGVPDRFSGSKSGTSASLAISGLQSEDEADYYCVAWDDSLRIWVFGGGTKLTVL

SEQ ID NO: 13342 - protein, 101 aa, Homo sapiens
QSVLIQPPSVSGTPGQRVTISCFGSTSNIGSRDGSRPVNWYQHLPETAPRLLIYENDQRPSGVPDRFSGSKSGTSASLAISGLQSEDEGDYYCLSWDDRLS

SEQ ID NO: 13343 - protein, 114 aa, Homo sapiens
QSVLIQPPSVSGTPGQRVTISCFGSTSNIGSRDGSRPVNWYQHLPETAPRLLIYENDQRPSGVPDRFSGSKSGTSASLAISGLQSEDEGDYYCLSWDDRLSAWVFGGGTKLTVL

SEQ ID NO: 13344 - protein, 97 aa, Homo sapiens
QSVLIQPSAASGTPGQRVTISCSGSSSNIGNNPVNWYQQLPGTAPKLLIYGNNSQRPSGVPDRFSGSKSGTSASLAISGLQSEDEADYYCAAWDDSL

SEQ ID NO: 13345 - protein, 111 aa, Homo sapiens
QSVLIQPSAASGTPGQRVTISCSGSSSNIGNNPVNWYQQLPGTAPKLLIYGNNSQRPSGVPDRFSGSKSGTSASLAISGLQSEDEADYYCAAWDDSLRIWVFGGGTKLTVL

SEQ ID NO: 13346 - protein, 98 aa, Homo sapiens
QSVLSQPPSASETPGQRVTISCSGSDSNIGSNYVYWYQHVPGVAPKLLIYRNHQRPSGVPDRFVGFKSGASASLAISGLRAEDEADYYCASWDDSLGG

SEQ ID NO: 13347 - protein, 111 aa, Homo sapiens
QSVLSQPPSASETPGQRVTISCSGSDSNIGSNYVYWYQHVPGVAPKLLIYRNHQRPSGVPDRFVGFKSGASASLAISGLRAEDEADYYCASWDDSLGGFYVFGTGTKVTVL

SEQ ID NO: 13348 - protein, 98 aa, Homo sapiens
QSVLSQPPSASGTPGQRVIISCSGSRSNIGGSTVNWFQQLPGTAPKLLIHNNNQRPSGVPDRFSGSKSGTSASLAISGLQSEDEADYHCAVWDDSLNG

SEQ ID NO: 13349 - protein, 110 aa, Homo sapiens
QSVLSQPPSASGTPGQRVIISCSGSRSNIGGSTVNWFQQLPGTAPKLLIHNNNQRPSGVPDRFSGSKSGTSASLAISGLQSEDEADYHCAVWDDSLNGWMFGGGTKLTVL

SEQ ID NO: 13350 - protein, 98 aa, Homo sapiens
QSVLTQPASASGTPGQRVTMSCSGSRSNIGSNPVSWYQQVPGSAPKLLMYSNNQRPSGVPDRFSGSKSGTSASLAITGLQSEDETDYYCAAWDDSLKG

SEQ ID NO: 13351 - protein, 110 aa, Homo sapiens
QSVLTQPASASGTPGQRVTMSCSGSRSNIGSNPVSWYQQVPGSAPKLLMYSNNQRPSGVPDRFSGSKSGTSASLAITGLQSEDETDYYCAAWDDSLKGWVFGGGTTLTVL

SEQ ID NO: 13352 - protein, 98 aa, Homo sapiens
QSVLTQPASVSGSPGQSITISCTGTSSDVGGYNYVSWYQQHPGKSPKLMIYDVTKRPSGVSNRFSGSKSGNTASLTISGLQAEDEADYYCSSYTSSST

SEQ ID NO: 13353 - protein, 110 aa, Homo sapiens
QSVLTQPASVSGSPGQSITISCTGTSSDVGGYNYVSWYQQHPGKSPKLMIYDVTKRPSGVSNRFSGSKSGNTASLTISGLQAEDEADYYCSSYTSSSTLVFGGGTKLAVL

SEQ ID NO: 13354 - protein, 97 aa, Homo sapiens
QSVLTQPPSAAGTPGQRVTISCSGSSSNIGSHTVNWYLQVPGTAPKLLIYSDNQRRSGVPERFSGSRSGTSASLAISGLQSEDEADYYCAVWDDSLS

SEQ ID NO: 13355 - protein, 110 aa, Homo sapiens
QSVLTQPPSAAGTPGQRVTISCSGSSSNIGSHTVNWYLQVPGTAPKLLIYSDNQRRSGVPERFSGSRSGTSASLAISGLQSEDEADYYCAVWDDSLSALVFGGGTKLTVL

SEQ ID NO: 13356 - protein, 99 aa, Homo sapiens
QSVLTQPPSASGLPGQRVTISCSGSSSNIGSNTVNWYQHLPGTAPKLLIYGNNQRPSGVPDRFSGSKSGTSASLAISGLQSEDEADYYCAAWDDSLNGP

SEQ ID NO: 13357 - protein, 110 aa, Homo sapiens
QSVLTQPPSASGLPGQRVTISCSGSSSNIGSNTVNWYQHLPGTAPKLLIYGNNQRPSGVPDRFSGSKSGTSASLAISGLQSEDEADYYCAAWDDSLNGPVFGGGTKLTVL

SEQ ID NO: 13358 - protein, 98 aa, Homo sapiens
QSVLTQPPSASGTLGQRVTISCSGSSSNIEDNTVSWYQQLPGTAPQLLVYGENQRPSGVPDRFSASKSGTSASLAISGLQSEDEAHYYCAAWDDSLDG

SEQ ID NO: 13359 - protein, 110 aa, Homo sapiens
QSVLTQPPSASGTLGQRVTISCSGSSSNIEDNTVSWYQQLPGTAPQLLVYGENQRPSGVPDRFSASKSGTSASLAISGLQSEDEAHYYCAAWDDSLDGLAFGGGTKLTVL

SEQ ID NO: 13360 - protein, 99 aa, Homo sapiens
QSVLTQPPSASGTPGQNVTISCSGSSSNIGSYSGNWYQLLPGTAPKLLIYRNNERPSGVPDRFSGSKSGTSASLAISGLQSEDEADYYCASWDDSLSGP

SEQ ID NO: 13361 - protein, 110 aa, Homo sapiens
QSVLTQPPSASGTPGQNVTISCSGSSSNIGSYSGNWYQLLPGTAPKLLIYRNNERPSGVPDRFSGSKSGTSASLAISGLQSEDEADYYCASWDDSLSGPVFGGGTKVTVL

SEQ ID NO: 13362 - protein, 97 aa, Homo sapiens
QSVLTQPPSASGTPGQRITISCSGSNSNIGSNTVNWYQQFPGTAPKLLIYGDSQRPSGVPDRFSGFKSGTSGSLVINGLQSDDEAHYHCSTWDDGLN

SEQ ID NO: 13363 - protein, 110 aa, Homo sapiens
QSVLTQPPSASGTPGQRITISCSGSNSNIGSNTVNWYQQFPGTAPKLLIYGDSQRPSGVPDRFSGFKSGTSGSLVINGLQSDDEAHYHCSTWDDGLNLWVFGGGTKLTVL

SEQ ID NO: 13364 - protein, 98 aa, Homo sapiens
QSVLTQPPSASGTPGQRVAISCSGSSSNIGSNSVNWYQHLPGTAPKLLIFGNNQRPSGVPDRFSDSKSGTSASLAISGLQSEDEADYYCAAWDASLNG

SEQ ID NO: 13365 - protein, 110 aa, Homo sapiens
QSVLTQPPSASGTPGQRVAISCSGSSSNIGSNSVNWYQHLPGTAPKLLIFGNNQRPSGVPDRFSDSKSGTSASLAISGLQSEDEADYYCAAWDASLNGWVFGGGTKLTVL

SEQ ID NO: 13366 - protein, 98 aa, Homo sapiens
QSVLTQPPSASGTPGQRVSISCSGSSSNIGTSTVHWFQQLPGTAPKVLISTNDQRPSGVPDRFSGSKSGTSASLAISGLQSEDAADYYCAVWDDSLNG

SEQ ID NO: 13367 - protein, 110 aa, Homo sapiens
QSVLTQPPSASGTPGQRVSISCSGSSSNIGTSTVHWFQQLPGTAPKVLISTNDQRPSGVPDRFSGSKSGTSASLAISGLQSEDAADYYCAVWDDSLNGWAFGGGTKLTVL

SEQ ID NO: 13368 - protein, 99 aa, Homo sapiens
QSVLTQPPSASGTPGQRVTISCSGGSSNIETNFVYWYQHLPGTAPKLLIYRNKQRPSGVPDRFSGSKSGTSASLAISGLRSEDEADYYCAAWDDSLSGP

SEQ ID NO: 13369 - protein, 110 aa, Homo sapiens
QSVLTQPPSASGTPGQRVTISCSGGSSNIETNFVYWYQHLPGTAPKLLIYRNKQRPSGVPDRFSGSKSGTSASLAISGLRSEDEADYYCAAWDDSLSGPVFGGGTRLTVL

SEQ ID NO: 13370 - protein, 99 aa, Homo sapiens
QSVLTQPPSASGTPGQRVTISCSGGSSNIGTNIVNWYQHLPGTAPKLLIYSDNKRPSGVPDRFSGSKSGTSASLAISGLQSEDEADYFCAAWDDSLNGP

SEQ ID NO: 13371 - protein, 110 aa, Homo sapiens
QSVLTQPPSASGTPGQRVTISCSGGSSNIGTNIVNWYQHLPGTAPKLLIYSDNKRPSGVPDRFSGSKSGTSASLAISGLQSEDEADYFCAAWDDSLNGPVFGGGTKLTVL

SEQ ID NO: 13372 - protein, 98 aa, Homo sapiens
QSVLTQPPSASGTPGQRVTISCSGGTSNIGRNFVYWYQQLPGTAPKLLIYSNDQRPSGVPDRFSGSKSGTSASLAISGLRSEDESDYYCAAWDDSLNS

SEQ ID NO: 13373 - protein, 110 aa, Homo sapiens
QSVLTQPPSASGTPGQRVTISCSGGTSNIGRNFVYWYQQLPGTAPKLLIYSNDQRPSGVPDRFSGSKSGTSASLAISGLRSEDESDYYCAAWDDSLNSRLFGGGTKLTVL

SEQ ID NO: 13374 - protein, 98 aa, Homo sapiens
QSVLTQPPSASGTPGQRVTISCSGNSSNIGSNYVFWYQQLPGTAPKLLIYKNNRRPSGVPDRFSGSKSGTSASLAISGLRSEDEADYYCAAWDDSLSR

SEQ ID NO: 13375 - protein, 111 aa, Homo sapiens
QSVLTQPPSASGTPGQRVTISCSGNSSNIGSNYVFWYQQLPGTAPKLLIYKNNRRPSGVPDRFSGSKSGTSASLAISGLRSEDEADYYCAAWDDSLSRQEMFGGGTKLTVL

SEQ ID NO: 13376 - protein, 98 aa, Homo sapiens
QSVLTQPPSASGTPGQRVTISCSGSDSNIGSNSVCWYQQLPGTAPKLLVFRDNQRPSGVPDRFSGSKSGTSASLAISGLRSEDEAHYYCAAWDDRLSG

SEQ ID NO: 13377 - protein, 111 aa, Homo sapiens
QSVLTQPPSASGTPGQRVTISCSGSDSNIGSNSVCWYQQLPGTAPKLLVFRDNQRPSGVPDRFSGSKSGTSASLAISGLRSEDEAHYYCAAWDDRLSGYWVFGGGTKLTVL

SEQ ID NO: 13378 - protein, 99 aa, Homo sapiens
QSVLTQPPSASGTPGQRVTISCSGSKSNFGRNTANWYQQFPGAAPKLLIHTNNQRPSGVPDRFSGSNSGTSASLAISGLQSEDEAHYYCAVWDDSLNGP

SEQ ID NO: 13379 - protein, 110 aa, Homo sapiens
QSVLTQPPSASGTPGQRVTISCSGSKSNFGRNTANWYQQFPGAAPKLLIHTNNQRPSGVPDRFSGSNSGTSASLAISGLQSEDEAHYYCAVWDDSLNGPVFGGGTKLTVL

SEQ ID NO: 13380 - protein, 99 aa, Homo sapiens
QSVLTQPPSASGTPGQRVTISCSGSNSNIGRNTVNWYQQLPGTAPKLLIHKNDQRPSGVPDRFSGSKSGTSASLAISGLQSEDEADYYCATWDDSLNGP

SEQ ID NO: 13381 - protein, 110 aa, Homo sapiens
QSVLTQPPSASGTPGQRVTISCSGSNSNIGRNTVNWYQQLPGTAPKLLIHKNDQRPSGVPDRFSGSKSGTSASLAISGLQSEDEADYYCATWDDSLNGPVFGGGTKLTVL

SEQ ID NO: 13382 - protein, 98 aa, Homo sapiens
QSVLTQPPSASGTPGQRVTISCSGSNSNIGSDYVYWYQQLPGTAPKLLIYRNDQRPSGVPDRFSGSKSGTSASLAISGLRSEDEADYYCAAWDDSLSG

SEQ ID NO: 13383 - protein, 110 aa, Homo sapiens
QSVLTQPPSASGTPGQRVTISCSGSNSNIGSDYVYWYQQLPGTAPKLLIYRNDQRPSGVPDRFSGSKSGTSASLAISGLRSEDEADYYCAAWDDSLSGWVFGGGTKLTVL

SEQ ID NO: 13384 - protein, 98 aa, Homo sapiens
QSVLTQPPSASGTPGQRVTISCSGSSPNIGSNTVIWFHQLPGTAPKLLIYGNDQRPSGVPDRVSGSKSGTSASLAISGLQSEDEGDYYCVAWDDNLNG

SEQ ID NO: 13385 - protein, 110 aa, Homo sapiens
QSVLTQPPSASGTPGQRVTISCSGSSPNIGSNTVIWFHQLPGTAPKLLIYGNDQRPSGVPDRVSGSKSGTSASLAISGLQSEDEGDYYCVAWDDNLNGWVFGGGTKLTVL

SEQ ID NO: 13386 - protein, 98 aa, Homo sapiens
QSVLTQPPSASGTPGQRVTISCSGSSSNIEKDYVCWYQQLPGTAPKLLIFKNDQRPSGVPDRFSGSKSGTSASLAISGLQSEDEADYYCAGWDDSLSG

SEQ ID NO: 13387 - protein, 111 aa, Homo sapiens
QSVLTQPPSASGTPGQRVTISCSGSSSNIEKDYVCWYQQLPGTAPKLLIFKNDQRPSGVPDRFSGSKSGTSASLAISGLQSEDEADYYCAGWDDSLSGSVLFGGGTKLTVL

SEQ ID NO: 13388 - protein, 97 aa, Homo sapiens
QSVLTQPPSASGTPGQRVTISCSGSSSNIESNTVNWYQQLPGTAPKLLIYNNSQRPSGVPDRFSGSKSGTSASLAISGLQSEDEADYYCASWDDRLN

SEQ ID NO: 13389 - protein, 110 aa, Homo sapiens
QSVLTQPPSASGTPGQRVTISCSGSSSNIESNTVNWYQQLPGTAPKLLIYNNSQRPSGVPDRFSGSKSGTSASLAISGLQSEDEADYYCASWDDRLNAPRFGGGTKLTVL

SEQ ID NO: 13390 - protein, 96 aa, Homo sapiens
QSVLTQPPSASGTPGQRVTISCSGSSSNIGKNIVNWYQQLPGTAPRLLIYETDQRPSGVPDRFSGSQSGTTASLALSGLQSEDEADYYCATWDDSL

SEQ ID NO: 13391 - protein, 110 aa, Homo sapiens
QSVLTQPPSASGTPGQRVTISCSGSSSNIGKNIVNWYQQLPGTAPRLLIYETDQRPSGVPDRFSGSQSGTTASLALSGLQSEDEADYYCATWDDSLRAWVFGGGTKVTVL

SEQ ID NO: 13392 - protein, 97 aa, Homo sapiens
QSVLTQPPSASGTPGQRVTISCSGSSSNIGNNAVNWYQHLPGTAPKLLIYSNNQRPSGVPDRFSGSKSGTSASLAISGLQSEDEADYYCAAWDGSLN

SEQ ID NO: 13393 - protein, 110 aa, Homo sapiens
QSVLTQPPSASGTPGQRVTISCSGSSSNIGNNAVNWYQHLPGTAPKLLIYSNNQRPSGVPDRFSGSKSGTSASLAISGLQSEDEADYYCAAWDGSLNAFVFGPGTTVNVL

SEQ ID NO: 13394 - protein, 96 aa, Homo sapiens
QSVLTQPPSASGTPGQRVTISCSGSSSNIGRNIVNWYQQVPDSAPRLLIYGSHQRPSGVPDRFSGSQSGASASLAISGLRSEDEADYYCATWDDGL

SEQ ID NO: 13395 - protein, 110 aa, Homo sapiens
QSVLTQPPSASGTPGQRVTISCSGSSSNIGRNIVNWYQQVPDSAPRLLIYGSHQRPSGVPDRFSGSQSGASASLAISGLRSEDEADYYCATWDDGLEAWVFGGGTKLTVL

SEQ ID NO: 13396 - protein, 96 aa, Homo sapiens
QSVLTQPPSASGTPGQRVTISCSGSSSNIGRNTVSWYHQVPGTAPKLLIYNNNQRPSGVPDRFSGSKSGTSASLAISGLQSEDEADYYCAAWDDGL

SEQ ID NO: 13397 - protein, 110 aa, Homo sapiens
QSVLTQPPSASGTPGQRVTISCSGSSSNIGRNTVSWYHQVPGTAPKLLIYNNNQRPSGVPDRFSGSKSGTSASLAISGLQSEDEADYYCAAWDDGLEDYVFGTGTKVTVL

SEQ ID NO: 13398 - protein, 98 aa, Homo sapiens
QSVLTQPPSASGTPGQRVTISCSGSSSNIGRNYVYWYYQLPGTTPKLLIYRNNQWPSGVPDRFSGSKSGTSASLAISGLRSEDEADYYCAAWDDTLSG

SEQ ID NO: 13399 - protein, 110 aa, Homo sapiens
QSVLTQPPSASGTPGQRVTISCSGSSSNIGRNYVYWYYQLPGTTPKLLIYRNNQWPSGVPDRFSGSKSGTSASLAISGLRSEDEADYYCAAWDDTLSGWLFGGGTKLTVL

SEQ ID NO: 13400 - protein, 98 aa, Homo sapiens
QSVLTQPPSASGTPGQRVTISCSGSSSNIGSNPVNWFHHLPGTAPKLLIYSNNQRPSGVPDRFSGSKSGTSVSLAISGLQSEDEADYYCAAWDNSLNG

SEQ ID NO: 13401 - protein, 110 aa, Homo sapiens
QSVLTQPPSASGTPGQRVTISCSGSSSNIGSNPVNWFHHLPGTAPKLLIYSNNQRPSGVPDRFSGSKSGTSVSLAISGLQSEDEADYYCAAWDNSLNGWVLGGGTKLTIL

SEQ ID NO: 13402 - protein, 98 aa, Homo sapiens
QSVLTQPPSASGTPGQRVTISCSGSSSNIGSNSVNWYQLVPGTAPKLLIFGNSQRPSGVPDRFSDSKSGTSASLAIRGLQSEDEADYYCAAWDASLNG

SEQ ID NO: 13403 - protein, 110 aa, Homo sapiens
QSVLTQPPSASGTPGQRVTISCSGSSSNIGSNSVNWYQLVPGTAPKLLIFGNSQRPSGVPDRFSDSKSGTSASLAIRGLQSEDEADYYCAAWDASLNGWVFGGGTKLTVL

SEQ ID NO: 13404 - protein, 98 aa, Homo sapiens
QSVLTQPPSASGTPGQRVTISCSGSSSNIGSNTVIWFQQLPGTAPKVFIHTNNQRPSGVPDRFSGSKSGTSASLAISGLQSEDEAEYFCAAWDDTLNG

SEQ ID NO: 13405 - protein, 110 aa, Homo sapiens
QSVLTQPPSASGTPGQRVTISCSGSSSNIGSNTVIWFQQLPGTAPKVFIHTNNQRPSGVPDRFSGSKSGTSASLAISGLQSEDEAEYFCAAWDDTLNGWMFGGGTKLTVL

SEQ ID NO: 13406 - protein, 98 aa, Homo sapiens
QSVLTQPPSASGTPGQRVTISCSGSSSNIGSNTVNWYQHLPGTAPKLLIYSNNQRPSGVPDRFSGSKSGTSASLVISGLQSEDEADYYCAPWDDSLSS

SEQ ID NO: 13407 - protein, 110 aa, Homo sapiens
QSVLTQPPSASGTPGQRVTISCSGSSSNIGSNTVNWYQHLPGTAPKLLIYSNNQRPSGVPDRFSGSKSGTSASLVISGLQSEDEADYYCAPWDDSLSSLVFGGGTKLTVL

SEQ ID NO: 13408 - protein, 99 aa, Homo sapiens
QSVLTQPPSASGTPGQRVTISCSGSSSNIGSNTVNWYQQFPGTAPKLLIYSNTQRPSGVPDRFSGSKSGTSASLAISGLLSEDEAHYYCATWDDSLNGP

SEQ ID NO: 13409 - protein, 110 aa, Homo sapiens
QSVLTQPPSASGTPGQRVTISCSGSSSNIGSNTVNWYQQFPGTAPKLLIYSNTQRPSGVPDRFSGSKSGTSASLAISGLLSEDEAHYYCATWDDSLNGPEFGGGTKLTVL

SEQ ID NO: 13410 - protein, 98 aa, Homo sapiens
QSVLTQPPSASGTPGQRVTISCSGSSSNIGSNTVNWYQQLPGTAPKLLIYSNNQRPSGVPDRFSGSKSGTSASLAIGGLQSEDEADYYCAAWDDRLKG

SEQ ID NO: 13411 - protein, 110 aa, Homo sapiens
QSVLTQPPSASGTPGQRVTISCSGSSSNIGSNTVNWYQQLPGTAPKLLIYSNNQRPSGVPDRFSGSKSGTSASLAIGGLQSEDEADYYCAAWDDRLKGVVFGGGTKLTVL

SEQ ID NO: 13412 - protein, 97 aa, Homo sapiens
QSVLTQPPSASGTPGQRVTISCSGSSSNIGSNTVNWYQQLPGTAPKLLIYSNNQRPSGVPDRFSGSKSGTSASLAISGLQSEDEADYYCAAWDDSLN

SEQ ID NO: 13413 - protein, 98 aa, Homo sapiens
QSVLTQPPSASGTPGQRVTISCSGSSSNIGSNTVNWYQQLPGTAPKLLIYSNNQRPSGVPDRFSGSKSGTSASLAISGLQSEDEADYYCAAWDDSLNG

SEQ ID NO: 13414 - protein, 99 aa, Homo sapiens
QSVLTQPPSASGTPGQRVTISCSGSSSNIGSNTVNWYQQLPGTAPKLLIYSNNQRPSGVPDRFSGSKSGTSASLAISGLQSEDEADYYCAAWDDSLNGP

SEQ ID NO: 13415 - protein, 110 aa, Homo sapiens
QSVLTQPPSASGTPGQRVTISCSGSSSNIGSNTVNWYQQLPGTAPKLLIYSNNQRPSGVPDRFSGSKSGTSASLAISGLQSEDEADYYCAAWDDSLNGPVFGGGTKLTVL

SEQ ID NO: 13416 - protein, 110 aa, Homo sapiens
QSVLTQPPSASGTPGQRVTISCSGSSSNIGSNTVNWYQQLPGTAPKLLIYSNNQRPSGVPDRFSGSKSGTSASLAISGLQSEDEADYYCAAWDDSLNGVVFGGGTKLTVL

SEQ ID NO: 13417 - protein, 111 aa, Homo sapiens
QSVLTQPPSASGTPGQRVTISCSGSSSNIGSNTVNWYQQLPGTAPKLLIYSNNQRPSGVPDRFSGSKSGTSASLAISGLQSEDEADYYCAAWDDSLNVFYVFGTGTKVTVL

SEQ ID NO: 13418 - protein, 99 aa, Homo sapiens
QSVLTQPPSASGTPGQRVTISCSGSSSNIGSNTVSWCQHLPGTAPKLLIYANNQRPSGVPDRFSGSKSGTSASLAISGLQSEDEAHYYCAVWDDSLNGP

SEQ ID NO: 13419 - protein, 110 aa, Homo sapiens
QSVLTQPPSASGTPGQRVTISCSGSSSNIGSNTVSWCQHLPGTAPKLLIYANNQRPSGVPDRFSGSKSGTSASLAISGLQSEDEAHYYCAVWDDSLNGPVFGGGTKLTVL

SEQ ID NO: 13420 - protein, 98 aa, Homo sapiens
QSVLTQPPSASGTPGQRVTISCSGSSSNIGSNYVYWYQHLPGTAPKLLIYRNSQRPSGVPDRFSGSKSGTSASLAISGLRSEDETDYFCAAWDDTLSG

SEQ ID NO: 13421 - protein, 110 aa, Homo sapiens
QSVLTQPPSASGTPGQRVTISCSGSSSNIGSNYVYWYQHLPGTAPKLLIYRNSQRPSGVPDRFSGSKSGTSASLAISGLRSEDETDYFCAAWDDTLSGVVFGGGTKLTVL

SEQ ID NO: 13422 - protein, 98 aa, Homo sapiens
QSVLTQPPSASGTPGQRVTISCSGSSSNIGSNYVYWYQQLPGTAPKLLIYRNNQRPSGVPDRFSGSKSGTSASLAISGLRSEDEADYYCAAWDDSLSG

SEQ ID NO: 13423 - protein, 110 aa, Homo sapiens
QSVLTQPPSASGTPGQRVTISCSGSSSNIGSNYVYWYQQLPGTAPKLLIYRNNQRPSGVPDRFSGSKSGTSASLAISGLRSEDEADYYCAAWDDSLSGGVFGGGTKLTVL

SEQ ID NO: 13424 - protein, 111 aa, Homo sapiens
QSVLTQPPSASGTPGQRVTISCSGSSSNIGSNYVYWYQQLPGTAPKLLIYRNNQRPSGVPDRFSGSKSGTSASLAISGLRSEDEADYYCAAWDDSLSGHVVFGGGTKLTVL

SEQ ID NO: 13425 - protein, 110 aa, Homo sapiens
QSVLTQPPSASGTPGQRVTISCSGSSSNIGSNYVYWYQQLPGTAPKLLIYRNNQRPSGVPDRFSGSKSGTSASLAISGLRSEDEADYYCAAWDDSLSGWVFGGGTKLTVL

SEQ ID NO: 13426 - protein, 99 aa, Homo sapiens
QSVLTQPPSASGTPGQRVTISCSGSSSNIGSRAVNWFQQLPGAAPKLLIYNSDQRPSGVPDRFSGSKSGTSASLAISGLQSEDEAHYYCAVWDDSLNGP

SEQ ID NO: 13427 - protein, 110 aa, Homo sapiens
QSVLTQPPSASGTPGQRVTISCSGSSSNIGSRAVNWFQQLPGAAPKLLIYNSDQRPSGVPDRFSGSKSGTSASLAISGLQSEDEAHYYCAVWDDSLNGPVFGGGTKLTVL

SEQ ID NO: 13428 - protein, 98 aa, Homo sapiens
QSVLTQPPSASGTPGQRVTISCSGSSSNIGTNNVYWYQQLPGTAPKLLIYKNNQRPSGVPDRISGSKSGTSASLAISGLRSEDEADYYCATWDDSLSG

SEQ ID NO: 13429 - protein, 111 aa, Homo sapiens
QSVLTQPPSASGTPGQRVTISCSGSSSNIGTNNVYWYQQLPGTAPKLLIYKNNQRPSGVPDRISGSKSGTSASLAISGLRSEDEADYYCATWDDSLSGYWVFGGGTKLTVL

SEQ ID NO: 13430 - protein, 98 aa, Homo sapiens
QSVLTQPPSASGTPGQRVTISCSGSSSNIGTNTVNWFQQLPGTAPKLLIYRNNQRPSGVPDRFSGSKSGTSASLAISGLQSEDEADYYCAAWDDSLNG

SEQ ID NO: 13431 - protein, 111 aa, Homo sapiens
QSVLTQPPSASGTPGQRVTISCSGSSSNIGTNTVNWFQQLPGTAPKLLIYRNNQRPSGVPDRFSGSKSGTSASLAISGLQSEDEADYYCAAWDDSLNGRWVFGGGTKLTVL

SEQ ID NO: 13432 - protein, 98 aa, Homo sapiens
QSVLTQPPSASGTPGQRVTISCSGSSSNIGVNTVSWYQQLPGSTPKLLIYANDQRPPGVPGRFSGSKSGTSAALAISGLQSEDEAYYYCAAWDGRLNG

SEQ ID NO: 13433 - protein, 109 aa, Homo sapiens
QSVLTQPPSASGTPGQRVTISCSGSSSNIGVNTVSWYQQLPGSTPKLLIYANDQRPPGVPGRFSGSKSGTSAALAISGLQSEDEAYYYCAAWDGRLNGVFGGGTKLTVL

SEQ ID NO: 13434 - protein, 96 aa, Homo sapiens
QSVLTQPPSASGTPGQRVTISCSGSTSNIGKNIVNWYQQFPGTAPRLLMYSDDRRPSGVSDRFSGSRSGTSASLAISGLQSEDEADYYCVAWDDSL

SEQ ID NO: 13435 - protein, 110 aa, Homo sapiens
QSVLTQPPSASGTPGQRVTISCSGSTSNIGKNIVNWYQQFPGTAPRLLMYSDDRRPSGVSDRFSGSRSGTSASLAISGLQSEDEADYYCVAWDDSLEVWVFGGGTKLTVL

SEQ ID NO: 13436 - protein, 98 aa, Homo sapiens
QSVLTQPPSASGTPGQRVTISCSGSTSNIGSNYVYWYQQLPGTAPKLLIYRNNQRPSGVPDRFSGSKSDTSASLAISGLRSEDEADYFCAAWDDSLSG

SEQ ID NO: 13437 - protein, 111 aa, Homo sapiens
QSVLTQPPSASGTPGQRVTISCSGSTSNIGSNYVYWYQQLPGTAPKLLIYRNNQRPSGVPDRFSGSKSDTSASLAISGLRSEDEADYFCAAWDDSLSGYVVFGGGTKLTVL

SEQ ID NO: 13438 - protein, 98 aa, Homo sapiens
QSVLTQPPSASGTPGQRVTISCSGTSSNIGSNHVYWYQQLPGTAPRLLIYKHNQRPSGVPDRFSGSTSGTSASLAISGLRSEDEADYYCAAWDASLSG

SEQ ID NO: 13439 - protein, 111 aa, Homo sapiens
QSVLTQPPSASGTPGQRVTISCSGTSSNIGSNHVYWYQQLPGTAPRLLIYKHNQRPSGVPDRFSGSTSGTSASLAISGLRSEDEADYYCAAWDASLSGLAVFGGGTQLTVL

SEQ ID NO: 13440 - protein, 96 aa, Homo sapiens
QSVLTQPPSASGTPGQRVTMSCSGGSSNIGSNTVNWYRQLPGAAPKLLVHSDNRRPSGVPDRFSGSKSDTSASLAISGLQSEDEADYYCVAWDDRL

SEQ ID NO: 13441 - protein, 110 aa, Homo sapiens
QSVLTQPPSASGTPGQRVTMSCSGGSSNIGSNTVNWYRQLPGAAPKLLVHSDNRRPSGVPDRFSGSKSDTSASLAISGLQSEDEADYYCVAWDDRLKAWVFGGGTKLTVL

SEQ ID NO: 13442 - protein, 98 aa, Homo sapiens
QSVLTQPPSASGTPGQRVTMSCSGSGSNIGSNPVNWYQQVPGTAPKLLIYSDNQRPSGVPDRFSGSKSGTSASLAISGLQSEDETDYFCATWDDNLKG

SEQ ID NO: 13443 - protein, 110 aa, Homo sapiens
QSVLTQPPSASGTPGQRVTMSCSGSGSNIGSNPVNWYQQVPGTAPKLLIYSDNQRPSGVPDRFSGSKSGTSASLAISGLQSEDETDYFCATWDDNLKGWVFGGGTKLTVL

SEQ ID NO: 13444 - protein, 98 aa, Homo sapiens
QSVLTQPPSASGTPGQTVTISCSGSGSTIGSNTVNWYHLLPATAPKLLIYGNSHRPSGVPDRFSGSKSGTSASLAISGLQSEDEGDYFCVSWHDGLDG

SEQ ID NO: 13445 - protein, 110 aa, Homo sapiens
QSVLTQPPSASGTPGQTVTISCSGSGSTIGSNTVNWYHLLPATAPKLLIYGNSHRPSGVPDRFSGSKSGTSASLAISGLQSEDEGDYFCVSWHDGLDGWVFGGGTKLTVL

SEQ ID NO: 13446 - protein, 93 aa, Homo sapiens
QSVLTQPPSISAAPGQRVTISCIGSNSNLQNAYVSWYQQLPGTAPKLLIYDNTERPSEIPDRFSGSKSDTSATLVITGLQTGDEADYYCGAWD

SEQ ID NO: 13447 - protein, 108 aa, Homo sapiens
QSVLTQPPSISAAPGQRVTISCIGSNSNLQNAYVSWYQQLPGTAPKLLIYDNTERPSEIPDRFSGSKSDTSATLVITGLQTGDEADYYCGAWDSDLMIFGGGTKLTVL

SEQ ID NO: 13448 - protein, 98 aa, Homo sapiens
QSVLTQPPSLSEAPRQRVTISCSGRNSNIGNNLVNWYQQFPGKAPKLLIYNDNMLAPGVSGRFSGSKSGTSASLAISGLQSEDEADYYCAVWDDWLSG

SEQ ID NO: 13449 - protein, 110 aa, Homo sapiens
QSVLTQPPSLSEAPRQRVTISCSGRNSNIGNNLVNWYQQFPGKAPKLLIYNDNMLAPGVSGRFSGSKSGTSASLAISGLQSEDEADYYCAVWDDWLSGVVFGGGTRLTVL

SEQ ID NO: 13450 - protein, 99 aa, Homo sapiens
QSVLTQPPSVSAAAGQKVSISCSGSTSNIGNNYVSWYQQFPGTAPKLLIFDNSKRPSGTPDRFSGSKSGTSATLDITGLQTGDEAEYYCGTWDSRLSAG

SEQ ID NO: 13451 - protein, 110 aa, Homo sapiens
QSVLTQPPSVSAAAGQKVSISCSGSTSNIGNNYVSWYQQFPGTAPKLLIFDNSKRPSGTPDRFSGSKSGTSATLDITGLQTGDEAEYYCGTWDSRLSAGVFGGGTKLTVV

SEQ ID NO: 13452 - protein, 99 aa, Homo sapiens
QSVLTQPPSVSAAAGQRVTISCSGSSSNIGNNFVSWYQQLPGTAPKLLIYDNNKRPSGIPDRFSGSKSGTSATLGITGLQTGDEADYYCGTWDTSLSAG

SEQ ID NO: 13453 - protein, 111 aa, Homo sapiens
QSVLTQPPSVSAAAGQRVTISCSGSSSNIGNNFVSWYQQLPGTAPKLLIYDNNKRPSGIPDRFSGSKSGTSATLGITGLQTGDEADYYCGTWDTSLSAGVVFGGGTKLTVL

SEQ ID NO: 13454 - protein, 98 aa, Homo sapiens
QSVLTQPPSVSAAPGQKVTISCSASSSNIGDSHISWYQQVPGTAPKLLIYEDNKRPSGIPDRFSGSRSGTSATLGITGLQTGDEADYYCETWDRSLSA

SEQ ID NO: 13455 - protein, 110 aa, Homo sapiens
QSVLTQPPSVSAAPGQKVTISCSASSSNIGDSHISWYQQVPGTAPKLLIYEDNKRPSGIPDRFSGSRSGTSATLGITGLQTGDEADYYCETWDRSLSAYVFGTGTKVTVL

SEQ ID NO: 13456 - protein, 98 aa, Homo sapiens
QSVLTQPPSVSAAPGQKVTISCSGSSFNIGNNYVSWYQQLPGTAPKLLIYEDNKRPSGIPDRFSGSKSGTSATLGITGLQTGDEADYYCGTWDSSPGA

SEQ ID NO: 13457 - protein, 111 aa, Homo sapiens
QSVLTQPPSVSAAPGQKVTISCSGSSFNIGNNYVSWYQQLPGTAPKLLIYEDNKRPSGIPDRFSGSKSGTSATLGITGLQTGDEADYYCGTWDSSPGAHWVFGGGTKLTVV

SEQ ID NO: 13458 - protein, 98 aa, Homo sapiens
QSVLTQPPSVSAAPGQKVTISCSGSSSNIGADYVSWYQQFPGTAPKLLIYDNNKRPSGIPDRFSGSKSGTSATLGITGLQTGDEADYYCGTWDRSLSA

SEQ ID NO: 13459 - protein, 110 aa, Homo sapiens
QSVLTQPPSVSAAPGQKVTISCSGSSSNIGADYVSWYQQFPGTAPKLLIYDNNKRPSGIPDRFSGSKSGTSATLGITGLQTGDEADYYCGTWDRSLSAVVFGGGTKLTVL

SEQ ID NO: 13460 - protein, 99 aa, Homo sapiens
QSVLTQPPSVSAAPGQKVTISCSGSSSNIGKNYVSWYQHLPGTPPKLLIYENNKRPSGIPDRFSGSKSGTSATLAITGLQTGDEADYYCGTWDTSPNSG

SEQ ID NO: 13461 - protein, 110 aa, Homo sapiens
QSVLTQPPSVSAAPGQKVTISCSGSSSNIGKNYVSWYQHLPGTPPKLLIYENNKRPSGIPDRFSGSKSGTSATLAITGLQTGDEADYYCGTWDTSPNSGLFGGGTKLTVL

SEQ ID NO: 13462 - protein, 98 aa, Homo sapiens
QSVLTQPPSVSAAPGQKVTISCSGSSSNIGNMYVSWYQQFPGTAPKLLIYDNNKRPSGIPDRFSGSKSGTSATLDITGLQTGDEADYYCETWDTSLSA

SEQ ID NO: 13463 - protein, 110 aa, Homo sapiens
QSVLTQPPSVSAAPGQKVTISCSGSSSNIGNMYVSWYQQFPGTAPKLLIYDNNKRPSGIPDRFSGSKSGTSATLDITGLQTGDEADYYCETWDTSLSAYVFGTGTTVTVL

SEQ ID NO: 13464 - protein, 98 aa, Homo sapiens
QSVLTQPPSVSAAPGQKVTISCSGSSSNIGNNYVSWYQQFPGTAPKLLIYDNDKRPSGIPDRFSGSKSGTSATLGITGLQTGDGADYYCGTWDRSLTA

SEQ ID NO: 13465 - protein, 110 aa, Homo sapiens
QSVLTQPPSVSAAPGQKVTISCSGSSSNIGNNYVSWYQQFPGTAPKLLIYDNDKRPSGIPDRFSGSKSGTSATLGITGLQTGDGADYYCGTWDRSLTAVAFGGGTKLTVL

SEQ ID NO: 13466 - protein, 98 aa, Homo sapiens
QSVLTQPPSVSAAPGQKVTISCSGSSSNIGNNYVSWYQQFPGTAPKLLIYDNNKRPSGIPDRFSGSKSGTSATLGITGLQTGDEADYYCGTWDRSLTA

SEQ ID NO: 13467 - protein, 110 aa, Homo sapiens
QSVLTQPPSVSAAPGQKVTISCSGSSSNIGNNYVSWYQQFPGTAPKLLIYDNNKRPSGIPDRFSGSKSGTSATLGITGLQTGDEADYYCGTWDRSLTAVAFGGGTKLTVL

SEQ ID NO: 13468 - protein, 98 aa, Homo sapiens
QSVLTQPPSVSAAPGQKVTISCSGSSSNIGNNYVSWYQQLPGTAPKLLIYDNNKRPSGIPDRFSGSKSGTSATLGITGLQTGDEADYYCGTWDRSLSA

SEQ ID NO: 13469 - protein, 110 aa, Homo sapiens
QSVLTQPPSVSAAPGQKVTISCSGSSSNIGNNYVSWYQQLPGTAPKLLIYDNNKRPSGIPDRFSGSKSGTSATLGITGLQTGDEADYYCGTWDRSLSAVVFGGGTKLTVL

SEQ ID NO: 13470 - protein, 98 aa, Homo sapiens
QSVLTQPPSVSAAPGQKVTISCSGSSSNIGNNYVSWYQQLPGTAPKLLIYDNNKRPSGIPDRFSGSKSGTSATLGITGLQTGDEADYYCGTWDSSLSA

SEQ ID NO: 13471 - protein, 99 aa, Homo sapiens
QSVLTQPPSVSAAPGQKVTISCSGSSSNIGNNYVSWYQQLPGTAPKLLIYDNNKRPSGIPDRFSGSKSGTSATLGITGLQTGDEADYYCGTWDSSLSAG

SEQ ID NO: 13472 - protein, 110 aa, Homo sapiens
QSVLTQPPSVSAAPGQKVTISCSGSSSNIGNNYVSWYQQLPGTAPKLLIYDNNKRPSGIPDRFSGSKSGTSATLGITGLQTGDEADYYCGTWDSSLSAGVFGGGTKLTVL

SEQ ID NO: 13473 - protein, 111 aa, Homo sapiens
QSVLTQPPSVSAAPGQKVTISCSGSSSNIGNNYVSWYQQLPGTAPKLLIYDNNKRPSGIPDRFSGSKSGTSATLGITGLQTGDEADYYCGTWDSSLSAVWVFGGGTKLTVL

SEQ ID NO: 13474 - protein, 98 aa, Homo sapiens
QSVLTQPPSVSAAPGQKVTISCSGSSSNIGNNYVSWYQQLPGTAPKLLIYENNKRPSGIPDRFSGSKSGTSATLGITGLQTGDEADYYCGTWDSSLRA

SEQ ID NO: 13475 - protein, 110 aa, Homo sapiens
QSVLTQPPSVSAAPGQKVTISCSGSSSNIGNNYVSWYQQLPGTAPKLLIYENNKRPSGIPDRFSGSKSGTSATLGITGLQTGDEADYYCGTWDSSLRAVVFGGGTKLTVL

SEQ ID NO: 13476 - protein, 98 aa, Homo sapiens
QSVLTQPPSVSAAPGQKVTISCSGSSSNIGNNYVSWYQQLPGTAPKLLIYENNKRPSGIPDRFSGSKSGTSATLGITGLQTGDEADYYCGTWDSSLSA

SEQ ID NO: 13477 - protein, 99 aa, Homo sapiens
QSVLTQPPSVSAAPGQKVTISCSGSSSNIGNNYVSWYQQLPGTAPKLLIYENNKRPSGIPDRFSGSKSGTSATLGITGLQTGDEADYYCGTWDSSLSAG

SEQ ID NO: 13478 - protein, 112 aa, Homo sapiens
QSVLTQPPSVSAAPGQKVTISCSGSSSNIGNNYVSWYQQLPGTAPKLLIYENNKRPSGIPDRFSGSKSGTSATLGITGLQTGDEADYYCGTWDSSLSAGRVVFGGGTKLTVL

SEQ ID NO: 13479 - protein, 110 aa, Homo sapiens
QSVLTQPPSVSAAPGQKVTISCSGSSSNIGNNYVSWYQQLPGTAPKLLIYENNKRPSGIPDRFSGSKSGTSATLGITGLQTGDEADYYCGTWDSSLSAGVFGGGTKLTVL

SEQ ID NO: 13480 - protein, 111 aa, Homo sapiens
QSVLTQPPSVSAAPGQKVTISCSGSSSNIGNNYVSWYQQLPGTAPKLLIYENNKRPSGIPDRFSGSKSGTSATLGITGLQTGDEADYYCGTWDSSLSALWVFGGGTKLTVL

SEQ ID NO: 13481 - protein, 110 aa, Homo sapiens
QSVLTQPPSVSAAPGQKVTISCSGSSSNIGNNYVSWYQQLPGTAPKLLIYENNKRPSGIPDRFSGSKSGTSATLGITGLQTGDEADYYCGTWDSSLSAVVFGGGTKLTVL

SEQ ID NO: 13482 - protein, 111 aa, Homo sapiens
QSVLTQPPSVSAAPGQKVTISCSGSSSNIGNNYVSWYQQLPGTAPKLLIYENNKRPSGIPDRFSGSKSGTSATLGITGLQTGDEADYYCGTWDSSLSAVWVFGGGTKLTVL

SEQ ID NO: 13483 - protein, 99 aa, Homo sapiens
QSVLTQPPSVSAAPGQKVTISCSGSSSNIGNNYVSWYQQLPGTAPKLLIYENNRRPSGIPDRFSGSKSGTSATLGITGLQTGDEADYYCGTWDSSLSAG

SEQ ID NO: 13484 - protein, 113 aa, Homo sapiens
QSVLTQPPSVSAAPGQKVTISCSGSSSNIGNNYVSWYQQLPGTAPKLLIYENNRRPSGIPDRFSGSKSGTSATLGITGLQTGDEADYYCGTWDSSLSAGLNSVFGAGTKVTVL

SEQ ID NO: 13485 - protein, 99 aa, Homo sapiens
QSVLTQPPSVSAAPGQKVTISCSGSSSNIGNNYVSWYRQFPGTAPKLLIYENTKRPSGIPDRFSGSKSGTSATLGITGLQTGDEADYYCGTWDSSLNTG

SEQ ID NO: 13486 - protein, 110 aa, Homo sapiens
QSVLTQPPSVSAAPGQKVTISCSGSSSNIGNNYVSWYRQFPGTAPKLLIYENTKRPSGIPDRFSGSKSGTSATLGITGLQTGDEADYYCGTWDSSLNTGVFGGGTKLTVL

SEQ ID NO: 13487 - protein, 99 aa, Homo sapiens
QSVLTQPPSVSAAPGQKVTITCSGSSSNIGGNYVSWYQKFPGTAPKLLIYENTKRPSGIPDRFSGSKSGTSATLGITGLQPGDESDYFCGTWDTNLSAG

SEQ ID NO: 13488 - protein, 110 aa, Homo sapiens
QSVLTQPPSVSAAPGQKVTITCSGSSSNIGGNYVSWYQKFPGTAPKLLIYENTKRPSGIPDRFSGSKSGTSATLGITGLQPGDESDYFCGTWDTNLSAGVFGTGTKVTVL

SEQ ID NO: 13489 - protein, 99 aa, Homo sapiens
QSVLTQPPSVSAAPGQKVTVSCSGSSSNIGRNHVSWYQQLPGTAPTLLIYDNNKRPSGIPDRFSGSKSETSATLGITGLQIGDEADYYCGTWDSSLRAG

SEQ ID NO: 13490 - protein, 110 aa, Homo sapiens
QSVLTQPPSVSAAPGQKVTVSCSGSSSNIGRNHVSWYQQLPGTAPTLLIYDNNKRPSGIPDRFSGSKSETSATLGITGLQIGDEADYYCGTWDSSLRAGVFGGGTKLTVL

SEQ ID NO: 13491 - protein, 98 aa, Homo sapiens
QSVLTQPPSVSAAPGQQVTISCSGSSSNIGNNYVSWYQQFPGTAPKLLIYDNNKRPSGIPDRFSGSKSGTSATLGITGLQTGDEADYYCGTWDRSLTA

SEQ ID NO: 13492 - protein, 110 aa, Homo sapiens
QSVLTQPPSVSAAPGQQVTISCSGSSSNIGNNYVSWYQQFPGTAPKLLIYDNNKRPSGIPDRFSGSKSGTSATLGITGLQTGDEADYYCGTWDRSLTAVAFGGGTKLTVL

SEQ ID NO: 13493 - protein, 97 aa, Homo sapiens
QSVLTQPPSVSAAPGQRVTISCSGSNSNIGSNFVSWYQLLPGAAPRLLIYDNTKRPSGIPDRFSGSKSGTSATLDISGLQTGDEADYYCGTWDTSLN

SEQ ID NO: 13494 - protein, 110 aa, Homo sapiens
QSVLTQPPSVSAAPGQRVTISCSGSNSNIGSNFVSWYQLLPGAAPRLLIYDNTKRPSGIPDRFSGSKSGTSATLDISGLQTGDEADYYCGTWDTSLNGGLFGGGTKLTVL

SEQ ID NO: 13495 - protein, 99 aa, Homo sapiens
QSVLTQPPSVSAAPGQTVSISCSGATSNIGDNYVSWYQHLPGSAPKLLIYKNNKRPSGIPGRFSGSKSGTSATLNITGLQTGDEADYYCGTWNSGLSAG

SEQ ID NO: 13496 - protein, 111 aa, Homo sapiens
QSVLTQPPSVSAAPGQTVSISCSGATSNIGDNYVSWYQHLPGSAPKLLIYKNNKRPSGIPGRFSGSKSGTSATLNITGLQTGDEADYYCGTWNSGLSAGRVFGGGTKLTVL

SEQ ID NO: 13497 - protein, 98 aa, Homo sapiens
QSVLTQPPSVSEAPRQRVTISCSGSSSNIGNNAVNWYQQLPGKAPKLLIYYDDLLPSGVSDRFSGSQSGTSASLAISGLQSEDEADYYCAAWDDSLNG

SEQ ID NO: 13498 - protein, 110 aa, Homo sapiens
QSVLTQPPSVSEAPRQRVTISCSGSSSNIGNNAVNWYQQLPGKAPKLLIYYDDLLPSGVSDRFSGSQSGTSASLAISGLQSEDEADYYCAAWDDSLNGYVFGTGTKVTVL

SEQ ID NO: 13499 - protein, 99 aa, Homo sapiens
QSVLTQPPSVSGAPGQRVTFSCTGSSSNIGATYDVHWYQQLPGTAPKLLIYGNNNRPSGVPDRFSGSKSGTSASLAITGLQAEDEADYFCQSHDSTLSA

SEQ ID NO: 13500 - protein, 111 aa, Homo sapiens
QSVLTQPPSVSGAPGQRVTFSCTGSSSNIGATYDVHWYQQLPGTAPKLLIYGNNNRPSGVPDRFSGSKSGTSASLAITGLQAEDEADYFCQSHDSTLSAWVFGGGTKLTVL

SEQ ID NO: 13501 - protein, 99 aa, Homo sapiens
QSVLTQPPSVSGAPGQRVTISCAGSSSNIGAGYDVHWYQQLPGTAPKLLIYGNSNRPSGVPDRFSGSKSGTSASLAITGLQAEDEADYYCQSYDTTLSG

SEQ ID NO: 13502 - protein, 112 aa, Homo sapiens
QSVLTQPPSVSGAPGQRVTISCAGSSSNIGAGYDVHWYQQLPGTAPKLLIYGNSNRPSGVPDRFSGSKSGTSASLAITGLQAEDEADYYCQSYDTTLSGIYVFGTGTKVTVL

SEQ ID NO: 13503 - protein, 100 aa, Homo sapiens
QSVLTQPPSVSGAPGQRVTISCTGSSSNIGAAYDVHWYQQLPGTAPKLLIYGNDYRPSGVPDRFSGSKSGTSASLAITGLQAEDEADYYCQSYDTSLSGS

SEQ ID NO: 13504 - protein, 112 aa, Homo sapiens
QSVLTQPPSVSGAPGQRVTISCTGSSSNIGAAYDVHWYQQLPGTAPKLLIYGNDYRPSGVPDRFSGSKSGTSASLAITGLQAEDEADYYCQSYDTSLSGSYVFGSGTKVTVL

SEQ ID NO: 13505 - protein, 97 aa, Homo sapiens
QSVLTQPPSVSGAPGQRVTISCTGSSSNIGADFDVHWYQQLPGKAPKLFISGNNNRPSGVPDRFSGSKSDTSASLAISGLQAEDEADYYCQSYDSSL

SEQ ID NO: 13506 - protein, 111 aa, Homo sapiens
QSVLTQPPSVSGAPGQRVTISCTGSSSNIGADFDVHWYQQLPGKAPKLFISGNNNRPSGVPDRFSGSKSDTSASLAISGLQAEDEADYYCQSYDSSLNHWVFGGGTKVTVL

SEQ ID NO: 13507 - protein, 99 aa, Homo sapiens
QSVLTQPPSVSGAPGQRVTISCTGSSSNIGAGFDVHWYQQLPGTAPKLLIYGNSNRPSGVPDRFSGSKSGTSASLAITGLQAEDEADYYCQSYDSSLSG

SEQ ID NO: 13508 - protein, 112 aa, Homo sapiens
QSVLTQPPSVSGAPGQRVTISCTGSSSNIGAGFDVHWYQQLPGTAPKLLIYGNSNRPSGVPDRFSGSKSGTSASLAITGLQAEDEADYYCQSYDSSLSGYAVFGGGTKLTVL

SEQ ID NO: 13509 - protein, 100 aa, Homo sapiens
QSVLTQPPSVSGAPGQRVTISCTGSSSNIGAGYDVHWYQQLPGTAPKLLIYANSNRPSGVPDRFSGSKSGTSASLAITGLQAEDEADYYCQSYDRSLSGS

SEQ ID NO: 13510 - protein, 112 aa, Homo sapiens
QSVLTQPPSVSGAPGQRVTISCTGSSSNIGAGYDVHWYQQLPGTAPKLLIYANSNRPSGVPDRFSGSKSGTSASLAITGLQAEDEADYYCQSYDRSLSGSGVFGTGTKVTVL

SEQ ID NO: 13511 - protein, 100 aa, Homo sapiens
QSVLTQPPSVSGAPGQRVTISCTGSSSNIGAGYDVHWYQQLPGTAPKLLIYGDSNRPSGVPDRFSGSKSGTSASLAITGLQAEDEADYYCQSYDSSLSGS

SEQ ID NO: 13512 - protein, 111 aa, Homo sapiens
QSVLTQPPSVSGAPGQRVTISCTGSSSNIGAGYDVHWYQQLPGTAPKLLIYGDSNRPSGVPDRFSGSKSGTSASLAITGLQAEDEADYYCQSYDSSLSGSVFGGGTKLTVL

SEQ ID NO: 13513 - protein, 98 aa, Homo sapiens
QSVLTQPPSVSGAPGQRVTISCTGSSSNIGAGYDVHWYQQLPGTAPKLLIYGNSNRPSGVPDRFSGSKSGTSASLAITGLQAEDEADYYCQSYDSSLS

SEQ ID NO: 13514 - protein, 111 aa, Homo sapiens
QSVLTQPPSVSGAPGQRVTISCTGSSSNIGAGYDVHWYQQLPGTAPKLLIYGNSNRPSGVPDRFSGSKSGTSASLAITGLQAEDEADYYCQSYDSSLSAWVFGGGTKLTVL

SEQ ID NO: 13515 - protein, 99 aa, Homo sapiens
QSVLTQPPSVSGAPGQRVTISCTGSSSNIGAGYDVHWYQQLPGTAPKLLIYGNSNRPSGVPDRFSGSKSGTSASLAITGLQAEDEADYYCQSYDSSLSG

SEQ ID NO: 13516 - protein, 112 aa, Homo sapiens
QSVLTQPPSVSGAPGQRVTISCTGSSSNIGAGYDVHWYQQLPGTAPKLLIYGNSNRPSGVPDRFSGSKSGTSASLAITGLQAEDEADYYCQSYDSSLSGARVFGGGTKLTVL

SEQ ID NO: 13517 - protein, 112 aa, Homo sapiens
QSVLTQPPSVSGAPGQRVTISCTGSSSNIGAGYDVHWYQQLPGTAPKLLIYGNSNRPSGVPDRFSGSKSGTSASLAITGLQAEDEADYYCQSYDSSLSGKVVFGGGTKLTVL

SEQ ID NO: 13518 - protein, 100 aa, Homo sapiens
QSVLTQPPSVSGAPGQRVTISCTGSSSNIGAGYDVHWYQQLPGTAPKLLIYGNSNRPSGVPDRFSGSKSGTSASLAITGLQAEDEADYYCQSYDSSLSGS

SEQ ID NO: 13519 - protein, 111 aa, Homo sapiens
QSVLTQPPSVSGAPGQRVTISCTGSSSNIGAGYDVHWYQQLPGTAPKLLIYGNSNRPSGVPDRFSGSKSGTSASLAITGLQAEDEADYYCQSYDSSLSGSVFGGGTKLTVL

SEQ ID NO: 13520 - protein, 111 aa, Homo sapiens
QSVLTQPPSVSGAPGQRVTISCTGSSSNIGAGYDVHWYQQLPGTAPKLLIYGNSNRPSGVPDRFSGSKSGTSASLAITGLQAEDEADYYCQSYDSSLSGWVFGGGTKLTVL

SEQ ID NO: 13521 - protein, 111 aa, Homo sapiens
QSVLTQPPSVSGAPGQRVTISCTGSSSNIGAGYDVHWYQQLPGTAPKLLIYGNSNRPSGVPDRFSGSKSGTSASLAITGLQAEDEADYYCQSYDSSLSGYVFGTGTKVTVL

SEQ ID NO: 13522 - protein, 112 aa, Homo sapiens
QSVLTQPPSVSGAPGQRVTISCTGSSSNIGAGYDVHWYQQLPGTAPKLLIYGNSNRPSGVPDRFSGSKSGTSASLAITGLQAEDEADYYCQSYDSSLSGYVVFGGGTKLTVL

SEQ ID NO: 13523 - protein, 110 aa, Homo sapiens
QSVLTQPPSVSGAPGQRVTISCTGSSSNIGAGYDVHWYQQLPGTAPKLLIYGNSNRPSGVPDRFSGSKSGTSASLAITGLQAEDEADYYCQSYDSSLSVLFGTGTKVTVL

SEQ ID NO: 13524 - protein, 98 aa, Homo sapiens
QSVLTQPPSVSGAPGQRVTISCTGSSSNIGAGYDVHWYQQLPGTAPKLLIYGNSNRPSGVPDRFSGSKSGTSASLAITGLQAEDEADYYCQSYDSTLS

SEQ ID NO: 13525 - protein, 110 aa, Homo sapiens
QSVLTQPPSVSGAPGQRVTISCTGSSSNIGAGYDVHWYQQLPGTAPKLLIYGNSNRPSGVPDRFSGSKSGTSASLAITGLQAEDEADYYCQSYDSTLSVVFGGGTKLTVL

SEQ ID NO: 13526 - protein, 100 aa, Homo sapiens
QSVLTQPPSVSGAPGQRVTISCTGSSSNIGARYEVHWYQRLPGTAPKLLIYGNTNRPSGVPDRFSGSKSGTSASLAISGLQAEDEADYYCQSYDRSLSGS

SEQ ID NO: 13527 - protein, 111 aa, Homo sapiens
QSVLTQPPSVSGAPGQRVTISCTGSSSNIGARYEVHWYQRLPGTAPKLLIYGNTNRPSGVPDRFSGSKSGTSASLAISGLQAEDEADYYCQSYDRSLSGSVFGGGTKLTVL

SEQ ID NO: 13528 - protein, 97 aa, Homo sapiens
QSVLTQPPSVSGAPGQRVTISCTGSSSNIGASYDVHWYQHLPGTAPKLLIYGNNNRPSGVPDRFSGSRSGTSASLAITGLQTEDEAVYYCQSYDSSL

SEQ ID NO: 13529 - protein, 111 aa, Homo sapiens
QSVLTQPPSVSGAPGQRVTISCTGSSSNIGASYDVHWYQHLPGTAPKLLIYGNNNRPSGVPDRFSGSRSGTSASLAITGLQTEDEAVYYCQSYDSSLHIWVFGGGTDLTVL

SEQ ID NO: 13530 - protein, 99 aa, Homo sapiens
QSVLTQPPSVSGAPGQRVTISCTGSSSNIGASYDVHWYQHLPGTAPKLLIYGNNNRPSGVPDRFSGSRSGTSASLAITRLQTEDEADYYCQSYDSSLHV

SEQ ID NO: 13531 - protein, 111 aa, Homo sapiens
QSVLTQPPSVSGAPGQRVTISCTGSSSNIGASYDVHWYQHLPGTAPKLLIYGNNNRPSGVPDRFSGSRSGTSASLAITRLQTEDEADYYCQSYDSSLHVWVFGGGTDLTVL

SEQ ID NO: 13532 - protein, 97 aa, Homo sapiens
QSVLTQPPSVSGAPGQRVTISCTGSSSNIGASYDVHWYQHLPGTAPKLLIYGNNNRPSGVPDRFSGSRSVTSASLAITGLQTEDEAVYYCQSYDSSL

SEQ ID NO: 13533 - protein, 111 aa, Homo sapiens
QSVLTQPPSVSGAPGQRVTISCTGSSSNIGASYDVHWYQHLPGTAPKLLIYGNNNRPSGVPDRFSGSRSVTSASLAITGLQTEDEAVYYCQSYDSSLHIWVFGGGTDLTVL

SEQ ID NO: 13534 - protein, 97 aa, Homo sapiens
QSVLTQPPSVSGAPGQRVTISCTGSSSNIGASYDVHWYQHLPGTAPKLLIYGNTNRPSGVPDRFSGSRSGTSASLAITGLQTEDEGDYYCQSYDNSL

SEQ ID NO: 13535 - protein, 111 aa, Homo sapiens
QSVLTQPPSVSGAPGQRVTISCTGSSSNIGASYDVHWYQHLPGTAPKLLIYGNTNRPSGVPDRFSGSRSGTSASLAITGLQTEDEGDYYCQSYDNSLHIWVFGGGTDLTVL

SEQ ID NO: 13536 - protein, 97 aa, Homo sapiens
QSVLTQPPSVSGAPGQRVTISCTGSSSNIGTGYDVHWYQQLPGTAPKLLIYGHSNRPSGVPDRFSGSKSGTSASLAITGLQAEDEADYYCQSYDSSL

SEQ ID NO: 13537 - protein, 110 aa, Homo sapiens
QSVLTQPPSVSGAPGQRVTISCTGSSSNIGTGYDVHWYQQLPGTAPKLLIYGHSNRPSGVPDRFSGSKSGTSASLAITGLQAEDEADYYCQSYDSSLREVFGGGTKLTVL

SEQ ID NO: 13538 - protein, 97 aa, Homo sapiens
QSVLTQPPSVSGAPGQRVTISCTGSSSNIGTGYDVHWYQQLPGTAPKLLIYGNSNRPSGVPDRFSGSKSGTSASLAITGLQAEDEADYYCQSYDSSL

SEQ ID NO: 13539 - protein, 110 aa, Homo sapiens
QSVLTQPPSVSGAPGQRVTISCTGSSSNIGTGYDVHWYQQLPGTAPKLLIYGNSNRPSGVPDRFSGSKSGTSASLAITGLQAEDEADYYCQSYDSSLREVFGGGTKLTVL

SEQ ID NO: 13540 - protein, 100 aa, Homo sapiens
QSVLTQPPSVSGAPGQRVTISCTGSTSNIGAGYDVHWYQQLPGTAPKLLIFGSTNRPSGVPDRFSGSKSGTSASLAITGLQPEDEANYYCQSYDNSLSGS

SEQ ID NO: 13541 - protein, 111 aa, Homo sapiens
QSVLTQPPSVSGAPGQRVTISCTGSTSNIGAGYDVHWYQQLPGTAPKLLIFGSTNRPSGVPDRFSGSKSGTSASLAITGLQPEDEANYYCQSYDNSLSGSVFGGGTKLTVL

SEQ ID NO: 13542 - protein, 99 aa, Homo sapiens
QSVLTQPPSVSGAPGQRVTISCTGTSSNIGAGYDVHWYQQLPGEAPKLLIYNTGYRPSGVPDRISGSKSGTSASLAITGLQGEDEADYYCRSYDGSLSG

SEQ ID NO: 13543 - protein, 111 aa, Homo sapiens
QSVLTQPPSVSGAPGQRVTISCTGTSSNIGAGYDVHWYQQLPGEAPKLLIYNTGYRPSGVPDRISGSKSGTSASLAITGLQGEDEADYYCRSYDGSLSGYVFGTGTKVTVL

SEQ ID NO: 13544 - protein, 94 aa, Homo sapiens
QSVLTQPPSVSGTPGQWVTISCSGSSSDIGNNYVYWYQQLPGTAPKLLIYKTKKRPSGVPDRFSGSKFGSSASLAISGLRSEDEADYYCAAWDN

SEQ ID NO: 13545 - protein, 108 aa, Homo sapiens
QSVLTQPPSVSGTPGQWVTISCSGSSSDIGNNYVYWYQQLPGTAPKLLIYKTKKRPSGVPDRFSGSKFGSSASLAISGLRSEDEADYYCAAWDNRSWVFGRGTKLTVL

SEQ ID NO: 13546 - protein, 98 aa, Homo sapiens
QSVLTQPRSVSGSPGQSVTISCTGTSSDVGRYDYVSWYQQYPGKAPKLMIYDVTKRPSGVPDRFSASKSGNTASLTISGLQAEDEADYYCCSYAGRYS

SEQ ID NO: 13547 - protein, 110 aa, Homo sapiens
QSVLTQPRSVSGSPGQSVTISCTGTSSDVGRYDYVSWYQQYPGKAPKLMIYDVTKRPSGVPDRFSASKSGNTASLTISGLQAEDEADYYCCSYAGRYSYVFGSGTGVTIL

SEQ ID NO: 13548 - protein, 99 aa, Homo sapiens
QSVLTQSPSVSGAPGQRVTISCTGGSSNIGAGYDVHWYQQVPGTAPKFLIYGNSNRPSGVPDRFSGSKSGTSASLAITGLQAEDEADYYCQSYDRSLRG

SEQ ID NO: 13549 - protein, 111 aa, Homo sapiens
QSVLTQSPSVSGAPGQRVTISCTGGSSNIGAGYDVHWYQQVPGTAPKFLIYGNSNRPSGVPDRFSGSKSGTSASLAITGLQAEDEADYYCQSYDRSLRGYVFGTGTKVTVL

SEQ ID NO: 13550 - protein, 98 aa, Homo sapiens
QSVLTQTPSASGTPGQRVTISCSGSSSNIGSNTVNWYQQLPGTAPKLLIYSNHQRPSGVPDRFSGSKSGTSASLAISGLQSEDEADYYCAAWDDSLKG

SEQ ID NO: 13551 - protein, 110 aa, Homo sapiens
QSVLTQTPSASGTPGQRVTISCSGSSSNIGSNTVNWYQQLPGTAPKLLIYSNHQRPSGVPDRFSGSKSGTSASLAISGLQSEDEADYYCAAWDDSLKGWVFGGGTKLTVL

SEQ ID NO: 13552 - protein, 94 aa, Homo sapiens
QSVLTQTPSVSGTPGQRVTMSCSGSTYNIGYNYVSWYQKIPGMAPKLLIYNFNERPSGVPDRFSGSKSGTSAYLAISGLRSEDEADYYCASRDD

SEQ ID NO: 13553 - protein, 110 aa, Homo sapiens
QSVLTQTPSVSGTPGQRVTMSCSGSTYNIGYNYVSWYQKIPGMAPKLLIYNFNERPSGVPDRFSGSKSGTSAYLAISGLRSEDEADYYCASRDDGWDDYVFGTGTRVFVL

SEQ ID NO: 13554 - protein, 98 aa, Homo sapiens
QSVMTQSPSASGTPGQRVTISCSGSSSNIGSSTVLWFQQVPGAAPKLLIFDNSHRPSGVPDRFSGSRSGASASLAISGIQSEDEADYYCVAWDNSLSG

SEQ ID NO: 13555 - protein, 110 aa, Homo sapiens
QSVMTQSPSASGTPGQRVTISCSGSSSNIGSSTVLWFQQVPGAAPKLLIFDNSHRPSGVPDRFSGSRSGASASLAISGIQSEDEADYYCVAWDNSLSGWVFGGGTKLTVL

SEQ ID NO: 13556 - protein, 96 aa, Homo sapiens
QSVMTQTPSASGTPGQRVTISCSGSSSNIGINTVNWYHQVPGTAPRLLIYSNHQRPSGVPDRFSGSKSGTSASLAISGLQSEDEGDYYCAAWDDSL

SEQ ID NO: 13557 - protein, 110 aa, Homo sapiens
QSVMTQTPSASGTPGQRVTISCSGSSSNIGINTVNWYHQVPGTAPRLLIYSNHQRPSGVPDRFSGSKSGTSASLAISGLQSEDEGDYYCAAWDDSLKAWVFGGGTKLTVL

SEQ ID NO: 13558 - protein, 96 aa, Homo sapiens
QSVVTQAPSASGTPGQRVTISCSGSRSNIGSNTVNWYQQLPGTAPKLLIYGNHQRPSGVPDRFSGSKSGTSASLAVSGLQSEDEADYYCLTWDNGL

SEQ ID NO: 13559 - protein, 110 aa, Homo sapiens
QSVVTQAPSASGTPGQRVTISCSGSRSNIGSNTVNWYQQLPGTAPKLLIYGNHQRPSGVPDRFSGSKSGTSASLAVSGLQSEDEADYYCLTWDNGLKAWVFGGGTKLTVL

SEQ ID NO: 13560 - protein, 103 aa, Homo sapiens
QSVVTQPASLSASPGTSASLTCTLHSGINVGSYRIYWYQQKSGSPPQFLLRYRSDSDKQRGSGVPSRFSGFKDVSANVGILLISGLQSEDEADYYCMIWHSDA

SEQ ID NO: 13561 - protein, 115 aa, Homo sapiens
QSVVTQPASLSASPGTSASLTCTLHSGINVGSYRIYWYQQKSGSPPQFLLRYRSDSDKQRGSGVPSRFSGFKDVSANVGILLISGLQSEDEADYYCMIWHSDAWVFGGGTKLTVL

SEQ ID NO: 13562 - protein, 96 aa, Homo sapiens
QSVVTQTPSASGTPGQRVTISCSGSSSNIGSNTVNWYQQLPGTAPKLLIYSNHQRPSGVPDRFSGSKSGTSASLAVSGLQSEDEADYYCVAWDDSL

SEQ ID NO: 13563 - protein, 110 aa, Homo sapiens
QSVVTQTPSASGTPGQRVTISCSGSSSNIGSNTVNWYQQLPGTAPKLLIYSNHQRPSGVPDRFSGSKSGTSASLAVSGLQSEDEADYYCVAWDDSLKAWVFGGGTKLTVL

SEQ ID NO: 13564 - protein, 11 aa, Homo sapiens
QSYDGRNQDVV

SEQ ID NO: 13565 - protein, 11 aa, Homo sapiens
QSYDNSLHIWV

SEQ ID NO: 13566 - protein, 11 aa, Homo sapiens
QSYDNSLSGSV

SEQ ID NO: 13567 - protein, 11 aa, Homo sapiens
QSYDRSLRGYV

SEQ ID NO: 13568 - protein, 12 aa, Homo sapiens
QSYDRSLSGLSV

SEQ ID NO: 13569 - protein, 12 aa, Homo sapiens
QSYDRSLSGSGV

SEQ ID NO: 13570 - protein, 11 aa, Homo sapiens
QSYDRSLSGSV

SEQ ID NO: 13571 - protein, 11 aa, Homo sapiens
QSYDSSLHIWV

SEQ ID NO: 13572 - protein, 11 aa, Homo sapiens
QSYDSSLHVWV

SEQ ID NO: 13573 - protein, 11 aa, Homo sapiens
QSYDSSLNHWV

SEQ ID NO: 13574 - protein, 10 aa, Homo sapiens
QSYDSSLREV

SEQ ID NO: 13575 - protein, 11 aa, Homo sapiens
QSYDSSLSAWV

SEQ ID NO: 13576 - protein, 12 aa, Homo sapiens
QSYDSSLSGARV

SEQ ID NO: 13577 - protein, 12 aa, Homo sapiens
QSYDSSLSGKVV

SEQ ID NO: 13578 - protein, 11 aa, Homo sapiens
QSYDSSLSGSV

SEQ ID NO: 13579 - protein, 11 aa, Homo sapiens
QSYDSSLSGWV

SEQ ID NO: 13580 - protein, 12 aa, Homo sapiens
QSYDSSLSGYAV

SEQ ID NO: 13581 - protein, 11 aa, Homo sapiens
QSYDSSLSGYV

SEQ ID NO: 13582 - protein, 12 aa, Homo sapiens
QSYDSSLSGYVV

SEQ ID NO: 13583 - protein, 10 aa, Homo sapiens
QSYDSSLSVL

SEQ ID NO: 13584 - protein, 9 aa, Homo sapiens
QSYDSSNQV

SEQ ID NO: 13585 - protein, 10 aa, Homo sapiens
QSYDSSNQVV

SEQ ID NO: 13586 - protein, 10 aa, Homo sapiens
QSYDSSNRGV

SEQ ID NO: 13587 - protein, 10 aa, Homo sapiens
QSYDSTLSVV

SEQ ID NO: 13588 - protein, 9 aa, Homo sapiens
QSYDTSARV

SEQ ID NO: 13589 - protein, 12 aa, Homo sapiens
QSYDTSLSGSYV

SEQ ID NO: 13590 - protein, 12 aa, Homo sapiens
QSYDTTLSGIYV

SEQ ID NO: 13591 - protein, 98 aa, Homo sapiens
QTALTQPRSVSGSPGQSVTISCTGSSTDVGGYNYVSWYQQNPGKAPKLMIYDVSKRPSGVPARFSGSKSANTASLTISGLQAEDEADYYCSSYEGTST

SEQ ID NO: 13592 - protein, 111 aa, Homo sapiens
QTALTQPRSVSGSPGQSVTISCTGSSTDVGGYNYVSWYQQNPGKAPKLMIYDVSKRPSGVPARFSGSKSANTASLTISGLQAEDEADYYCSSYEGTSTYVIFGGGTKLTVL

SEQ ID NO: 13593 - protein, 6 aa, Homo sapiens
QTPRGP

SEQ ID NO: 13594 - protein, 17 aa, Homo sapiens
QTRDPPYCSDGNCPINE

SEQ ID NO: 13595 - protein, 7 aa, Homo sapiens
QTSNLES

SEQ ID NO: 13596 - protein, 99 aa, Homo sapiens
QTVVTQEPSFSVSPGETVTLTCGLSSGSVSANNYPSWYQQTPGQAPRTLIYSTNTRSSGVPGRFSGSILGNKAALTITGAQADDECYYYCVLYMGSGIS

SEQ ID NO: 13597 - protein, 110 aa, Homo sapiens
QTVVTQEPSFSVSPGETVTLTCGLSSGSVSANNYPSWYQQTPGQAPRTLIYSTNTRSSGVPGRFSGSILGNKAALTITGAQADDECYYYCVLYMGSGISVFGGGTKLTVL

SEQ ID NO: 13598 - protein, 96 aa, Homo sapiens
QTVVTQEPSFSVSPGGTVTLTCGLNSGSISTSYYPCWYQQTPGQAPRTLIYSTNTRSSGVPDRFSGSILGNKAALTITGAQADDESDYYCALHMGS

SEQ ID NO: 13599 - protein, 109 aa, Homo sapiens
QTVVTQEPSFSVSPGGTVTLTCGLNSGSISTSYYPCWYQQTPGQAPRTLIYSTNTRSSGVPDRFSGSILGNKAALTITGAQADDESDYYCALHMGSYWVFGGGTKLTVL

SEQ ID NO: 13600 - protein, 98 aa, Homo sapiens
QTVVTQEPSFSVSPGGTVTLTCGLSSGSVSTSYYPSWYQQTPGQAPRTLIYSTNTRSSGVPDRFSGSILGNKAALTITGAQADDESDYYCVLYMGSGI

SEQ ID NO: 13601 - protein, 110 aa, Homo sapiens
QTVVTQEPSFSVSPGGTVTLTCGLSSGSVSTSYYPSWYQQTPGQAPRTLIYSTNTRSSGVPDRFSGSILGNKAALTITGAQADDESDYYCVLYMGSGIVVFGGGTKLTVL

SEQ ID NO: 13602 - protein, 110 aa, Homo sapiens
QTVVTQEPSFSVSPGGTVTLTCGLSSGSVSTSYYPSWYQQTPGQAPRTLIYSTNTRSSGVPDRFSGSILGNKAALTITGAQADDESDYYCVLYMGSGIWVFGGGTKLTVL

SEQ ID NO: 13603 - protein, 96 aa, Homo sapiens
QTVVTQEPSLTVSPGGTVTLTCASSTGAVTSGYYPNWFQQKPGQAPRALIYNTSNKHSWTPARFSGSLLGGKAALTLSGVQPEDEAEYYCLLYYGG

SEQ ID NO: 13604 - protein, 108 aa, Homo sapiens
QTVVTQEPSLTVSPGGTVTLTCASSTGAVTSGYYPNWFQQKPGQAPRALIYNTSNKHSWTPARFSGSLLGGKAALTLSGVQPEDEAEYYCLLYYGGWVFGGGTKLTVL

SEQ ID NO: 13605 - protein, 97 aa, Homo sapiens
QTVVTQEPSLTVSPGGTVTLTCASSTGDVTSGFYPNWFQQKPGQAPRALVYSTTNKHSWTPARFSGSLLGGKAALTLSGVQPEDEAEYYCLLYCDGA

SEQ ID NO: 13606 - protein, 109 aa, Homo sapiens
QTVVTQEPSLTVSPGGTVTLTCASSTGDVTSGFYPNWFQQKPGQAPRALVYSTTNKHSWTPARFSGSLLGGKAALTLSGVQPEDEAEYYCLLYCDGAWVFGGGTTLTVL

SEQ ID NO: 13607 - protein, 10 aa, Homo sapiens
QTWDKKVGVV

SEQ ID NO: 13608 - protein, 10 aa, Homo sapiens
QTWDSATGGV

SEQ ID NO: 13609 - protein, 9 aa, Homo sapiens
QTWDSSTVV

SEQ ID NO: 13610 - protein, 9 aa, Homo sapiens
QTWDTGIRV

SEQ ID NO: 13611 - protein, 10 aa, Homo sapiens
QTWGGGIQGV

SEQ ID NO: 13612 - protein, 9 aa, Homo sapiens
QTWGSGIAV

SEQ ID NO: 13613 - protein, 9 aa, Homo sapiens
QTWGTDSYV

SEQ ID NO: 13614 - protein, 9 aa, Homo sapiens
QTWGTGFWV

SEQ ID NO: 13615 - protein, 12 aa, Homo sapiens
QTWGTGIHASWV

SEQ ID NO: 13616 - protein, 11 aa, Homo sapiens
QTWGTGIPLAV

SEQ ID NO: 13617 - protein, 9 aa, Homo sapiens
QTWGTGIQV

SEQ ID NO: 13618 - protein, 10 aa, Homo sapiens
QTWGTGIQVV

SEQ ID NO: 13619 - protein, 9 aa, Homo sapiens
QTWGTGIVV

SEQ ID NO: 13620 - protein, 9 aa, Homo sapiens
QTWGTGIWV

SEQ ID NO: 13621 - protein, 9 aa, Homo sapiens
QTWGTGLYV

SEQ ID NO: 13622 - protein, 9 aa, Homo sapiens
QTWGTGMYV

SEQ ID NO: 13623 - protein, 9 aa, Homo sapiens
QTWGTGTVV

SEQ ID NO: 13624 - protein, 9 aa, Homo sapiens
QTWHNNTVI

SEQ ID NO: 13625 - protein, 9 aa, Homo sapiens
QTWVTGHYV

SEQ ID NO: 13626 - protein, 13 aa, Homo sapiens
QVEGSGSVTYFQH

SEQ ID NO: 13627 - protein, 97 aa, Homo sapiens
QVELQESGPGVVKPSETLSLTCNVSGVSINDYYWTWIRQPAGKGLEWVGRIYASGSTNYNPSLKSRVIMSVDTSQNLLSLKVASVTAADTAVYYCAR

SEQ ID NO: 13628 - protein, 120 aa, Homo sapiens
QVELQESGPGVVKPSETLSLTCNVSGVSINDYYWTWIRQPAGKGLEWVGRIYASGSTNYNPSLKSRVIMSVDTSQNLLSLKVASVTAADTAVYYCARGVMNFGVIILESWGQGILVAVSS

SEQ ID NO: 13629 - protein, 97 aa, Homo sapiens
QVELVESGGGVVQPGRSLRLSCAASKVTFSMYNMHWVRQAPGKGLEWLTRISYDGTNKYYADSVKGRFTISRDNSKTTLYLQMNSLRTEDTGVYYCA

SEQ ID NO: 13630 - protein, 120 aa, Homo sapiens
QVELVESGGGVVQPGRSLRLSCAASKVTFSMYNMHWVRQAPGKGLEWLTRISYDGTNKYYADSVKGRFTISRDNSKTTLYLQMNSLRTEDTGVYYCASSPAYFYYYMDVWGKGTTVTVSS

SEQ ID NO: 13631 - protein, 98 aa, Homo sapiens
QVELVQSGAEVKKPGSSVKVSCKVSGSIFNKYGISWVRQAPGQGLEWMGGITAIFNVPSYAQRFQGRVTITADKSTTTVYMQLSSLRSEDTAVYYCAR

SEQ ID NO: 13632 - protein, 122 aa, Homo sapiens
QVELVQSGAEVKKPGSSVKVSCKVSGSIFNKYGISWVRQAPGQGLEWMGGITAIFNVPSYAQRFQGRVTITADKSTTTVYMQLSSLRSEDTAVYYCARGDGYKPTMTPIAYWGQGTLVTVSS

SEQ ID NO: 13633 - protein, 98 aa, Homo sapiens
QVHLEESGGGVVQPGGSLRLSCTASGFTFSTFGMHWVRQPPGKGLEWVSFIRYDGSNKYYADSVKGRFTVSRDNSKNTVYVQMSSLTPEDTAVYFCAK

SEQ ID NO: 13634 - protein, 123 aa, Homo sapiens
QVHLEESGGGVVQPGGSLRLSCTASGFTFSTFGMHWVRQPPGKGLEWVSFIRYDGSNKYYADSVKGRFTVSRDNSKNTVYVQMSSLTPEDTAVYFCAKERVSLMAGYDYMDMWGQGALVIVSS

SEQ ID NO: 13635 - protein, 97 aa, Homo sapiens
QVHLEESGPGLVKPSETLSLTCTVSGDSIGTYYWSWIRQPPGKGLECIGYISYNGRTNYNPSLKSRVTISVDTSRNQFSLKLSSVTAADTAVYFCAR

SEQ ID NO: 13636 - protein, 121 aa, Homo sapiens
QVHLEESGPGLVKPSETLSLTCTVSGDSIGTYYWSWIRQPPGKGLECIGYISYNGRTNYNPSLKSRVTISVDTSRNQFSLKLSSVTAADTAVYFCARDDTGIRRKNAFDIWGQGTMVTVSS

SEQ ID NO: 13637 - protein, 99 aa, Homo sapiens
QVHLEQSGAEVKKPGASVKVSCKASGYTLTDYDINWVRQATGQGLEWMGWMTPNNGKTAFAQKFQGRVTMTMDTSMSTVYMELSSLRPEDTAIYYCARG

SEQ ID NO: 13638 - protein, 128 aa, Homo sapiens
QVHLEQSGAEVKKPGASVKVSCKASGYTLTDYDINWVRQATGQGLEWMGWMTPNNGKTAFAQKFQGRVTMTMDTSMSTVYMELSSLRPEDTAIYYCARGQNPRRTSIFEVVPQGFDPWGQGTLVTVSS

SEQ ID NO: 13639 - protein, 98 aa, Homo sapiens
QVHLEQSGAEVKKPGSSVKVSCKASGGIFRSNAINWVRQAPGQGLEWMGGILALFGTTYYAQKFQGRITITADESTSTAFMELRTLKSEDTAIYYCAK

SEQ ID NO: 13640 - protein, 124 aa, Homo sapiens
QVHLEQSGAEVKKPGSSVKVSCKASGGIFRSNAINWVRQAPGQGLEWMGGILALFGTTYYAQKFQGRITITADESTSTAFMELRTLKSEDTAIYYCAKAGGYHVSGERAFMDVWGEGTTVTVSS

SEQ ID NO: 13641 - protein, 98 aa, Homo sapiens
QVHLEQSGAEVKKPGSSVKVSCKASGGTFNNNAIIWVRQAPGQGLEWMGGINPMFGLVDYAEKFQGRVTITADGFPSAAYMELRKLRSEDTAVYYCAR

SEQ ID NO: 13642 - protein, 122 aa, Homo sapiens
QVHLEQSGAEVKKPGSSVKVSCKASGGTFNNNAIIWVRQAPGQGLEWMGGINPMFGLVDYAEKFQGRVTITADGFPSAAYMELRKLRSEDTAVYYCARGPNYHDTNTYLDPWGQGTLVTVSS

SEQ ID NO: 13643 - protein, 98 aa, Homo sapiens
QVHLEQSGPEVKKPGSSVKVSCKASGGTFSSYAIIWVRQAPGQGLEWMGGINPMFRIVNYAQKFQGRVTITADEFPSAAYMELSSLRPEDTAVYYCAR

SEQ ID NO: 13644 - protein, 122 aa, Homo sapiens
QVHLEQSGPEVKKPGSSVKVSCKASGGTFSSYAIIWVRQAPGQGLEWMGGINPMFRIVNYAQKFQGRVTITADEFPSAAYMELSSLRPEDTAVYYCARGPNYHDTNSYLDPWGQGTLVTVSS

SEQ ID NO: 13645 - protein, 98 aa, Homo sapiens
QVHLEQSGSEVKEPGASVKVSCKTSGYNFDNYAINWVRQAPGQGLEWMGRISAHNGDTKYTQKFQGRLTMTTDTSTTTAYMELRSLRSDDTAVYYCAR

SEQ ID NO: 13646 - protein, 126 aa, Homo sapiens
QVHLEQSGSEVKEPGASVKVSCKTSGYNFDNYAINWVRQAPGQGLEWMGRISAHNGDTKYTQKFQGRLTMTTDTSTTTAYMELRSLRSDDTAVYYCARGWRPRDESDGFYSWFDPWGQGTPVTVPS

SEQ ID NO: 13647 - protein, 98 aa, Homo sapiens
QVHLEQSGSEVKKPGASVKVSCKASGYSFRDYAISWVRQAPGQGLEWMGWISAHNGATKYKQKLQGRVTMTTDTSTTTAYMELRSLRSDDTAVYYCAR

SEQ ID NO: 13648 - protein, 126 aa, Homo sapiens
QVHLEQSGSEVKKPGASVKVSCKASGYSFRDYAISWVRQAPGQGLEWMGWISAHNGATKYKQKLQGRVTMTTDTSTTTAYMELRSLRSDDTAVYYCARGWRPRQESGGFYSWFDSWGQGTLVTVSS

SEQ ID NO: 13649 - protein, 98 aa, Homo sapiens
QVHLEQSGSEVKKPGASVKVSCKASGYSFSNYAINWVRQAPGQGLEWMGWISAHNGDTKYIEKFQGRVTMTTDTSTTTAYMELRSLRSDDTAVYYCAR

SEQ ID NO: 13650 - protein, 126 aa, Homo sapiens
QVHLEQSGSEVKKPGASVKVSCKASGYSFSNYAINWVRQAPGQGLEWMGWISAHNGDTKYIEKFQGRVTMTTDTSTTTAYMELRSLRSDDTAVYYCARGWRPRDESGGYYSWFDPWGQGTLVTVSS

SEQ ID NO: 13651 - protein, 98 aa, Homo sapiens
QVHLEQSGSEVKNPGASVRVSCKASGYSFINYAINWVRQAPGQGLEWMGRISAHDGDTKYARNFQGRVTMTTDTSTTTAHMELRNLRSDDTAVYFCAR

SEQ ID NO: 13652 - protein, 126 aa, Homo sapiens
QVHLEQSGSEVKNPGASVRVSCKASGYSFINYAINWVRQAPGQGLEWMGRISAHDGDTKYARNFQGRVTMTTDTSTTTAHMELRNLRSDDTAVYFCARAWRPRDASGGFYSWFDAWGQGTLVTVSS

SEQ ID NO: 13653 - protein, 98 aa, Homo sapiens
QVHLEQSGSEVKNPGASVRVSCKASGYSFSNYAINWVRQAPGQGLEWMGRISAHDGDTKYTQNFQGRVTMTTDTSTTTAHMELRSLRSDDTAVYFCAR

SEQ ID NO: 13654 - protein, 126 aa, Homo sapiens
QVHLEQSGSEVKNPGASVRVSCKASGYSFSNYAINWVRQAPGQGLEWMGRISAHDGDTKYTQNFQGRVTMTTDTSTTTAHMELRSLRSDDTAVYFCARGWRRRDESGGFYSWFDAWGQGTLVTVSS

SEQ ID NO: 13655 - protein, 98 aa, Homo sapiens
QVHLEQSGSEVKQPGASVKVSCKASGYSFTDQAINWVRQAPGQGLEWMGRISAQDDDIKYSQKFQDRVAMTTDTSTTTVYLELRSLRPDDTAVYYCAR

SEQ ID NO: 13656 - protein, 126 aa, Homo sapiens
QVHLEQSGSEVKQPGASVKVSCKASGYSFTDQAINWVRQAPGQGLEWMGRISAQDDDIKYSQKFQDRVAMTTDTSTTTVYLELRSLRPDDTAVYYCARGRRPGDESGGYYSWFDSWGQGTLVAVSS

SEQ ID NO: 13657 - protein, 98 aa, Homo sapiens
QVHLEQSGTEVKKPGSSVKVSCKASGVFFNKYAISWVRKAPGQGLEWLGRITPIFHRTNYAQNFQGRITISADERTTTAYMELSSLISEDTAVYYCAR

SEQ ID NO: 13658 - protein, 123 aa, Homo sapiens
QVHLEQSGTEVKKPGSSVKVSCKASGVFFNKYAISWVRKAPGQGLEWLGRITPIFHRTNYAQNFQGRITISADERTTTAYMELSSLISEDTAVYYCAREGGETIYAPSWFDPWGQGTLVIVSS

SEQ ID NO: 13659 - protein, 98 aa, Homo sapiens
QVHLLESGGGVVQPGMSLRLSCAASGFTFNTYGMHWVRQAPGKGLEWVAVISYDGSKKYYADSVKGRFTISRDNSKNTLSLQMNSLRAEDTAMYYCTK

SEQ ID NO: 13660 - protein, 127 aa, Homo sapiens
QVHLLESGGGVVQPGMSLRLSCAASGFTFNTYGMHWVRQAPGKGLEWVAVISYDGSKKYYADSVKGRFTISRDNSKNTLSLQMNSLRAEDTAMYYCTKDFTYYYNSGSDHLGYFDYWGQGTLVTVSS

SEQ ID NO: 13661 - protein, 97 aa, Homo sapiens
QVHLQESGPGLVKPSETLSLTCTVSDSISSDYYWAWIRQSPGKGLEWIGNIFRSGTTYYNPSLQSRVTISVDTSKNQFSLRLTSVTAADTAVYYCAR

SEQ ID NO: 13662 - protein, 115 aa, Homo sapiens
QVHLQESGPGLVKPSETLSLTCTVSDSISSDYYWAWIRQSPGKGLEWIGNIFRSGTTYYNPSLQSRVTISVDTSKNQFSLRLTSVTAADTAVYYCARQNHAFDIWGQGTIVTVAS

SEQ ID NO: 13663 - protein, 99 aa, Homo sapiens
QVHLQESGPGLVKPSQTLSLTCTVSNGSISSGGQCWSWLRQHPGKGLEWIAYIYNTGRSNYNPSLKSRVTISVDTSKNQFSLKLSSVTAADTAVYYCAR

SEQ ID NO: 13664 - protein, 131 aa, Homo sapiens
QVHLQESGPGLVKPSQTLSLTCTVSNGSISSGGQCWSWLRQHPGKGLEWIAYIYNTGRSNYNPSLKSRVTISVDTSKNQFSLKLSSVTAADTAVYYCARDLSGIYYDSSGLHQQSNAFDIWGQGTMVTVSS

SEQ ID NO: 13665 - protein, 99 aa, Homo sapiens
QVHLQESGPGLVKSSETLSLTCSVSNGSISSAGQCWSWLRQHPGKGLEWIAYIYNTGRSNYNPSLKSRVTISVDTSKNQFSLKLSSVTAADTAVYYCAR

SEQ ID NO: 13666 - protein, 131 aa, Homo sapiens
QVHLQESGPGLVKSSETLSLTCSVSNGSISSAGQCWSWLRQHPGKGLEWIAYIYNTGRSNYNPSLKSRVTISVDTSKNQFSLKLSSVTAADTAVYYCARDLSGIFYDSSGLHQQSNAFDIWGQGTMVTVSS

SEQ ID NO: 13667 - protein, 99 aa, Homo sapiens
QVHLQESGPGSVKPSETLSLTCTVSGASISSGSYSWSWIRQPAGEGLEWIGHISTTGSTKYNPSLKSRVTISIDTSRSQFSLKLSSVAAADTAVYYCAR

SEQ ID NO: 13668 - protein, 122 aa, Homo sapiens
QVHLQESGPGSVKPSETLSLTCTVSGASISSGSYSWSWIRQPAGEGLEWIGHISTTGSTKYNPSLKSRVTISIDTSRSQFSLKLSSVAAADTAVYYCARQDGVVGPIPFDYWGQGTLVTVSS

SEQ ID NO: 13669 - protein, 97 aa, Homo sapiens
QVHLQQWGAGLLKPSETLSLNCGVYGVSLSDWFWSWIRQVPGKGLEWIGEINQSGRTDYNPSLKSRVNILGDTSKNQFSLKLNSVTAADAAVYYCAR

SEQ ID NO: 13670 - protein, 122 aa, Homo sapiens
QVHLQQWGAGLLKPSETLSLNCGVYGVSLSDWFWSWIRQVPGKGLEWIGEINQSGRTDYNPSLKSRVNILGDTSKNQFSLKLNSVTAADAAVYYCARRPVGFGSGSYYFDYWGQGTLVTVSS

SEQ ID NO: 13671 - protein, 98 aa, Homo sapiens
QVHLQQWGAGLLKPSETLSLTCAASGGTFSGYFWYWIRQPPGKGLEWIGEINHTGGTTYNPSLKSRVTMSLDTSQNQFSLKLTSLTAADTAVYFCARG

SEQ ID NO: 13672 - protein, 125 aa, Homo sapiens
QVHLQQWGAGLLKPSETLSLTCAASGGTFSGYFWYWIRQPPGKGLEWIGEINHTGGTTYNPSLKSRVTMSLDTSQNQFSLKLTSLTAADTAVYFCARGLAPGYYGMVGGPPPYYWGQGTLVTVSS

SEQ ID NO: 13673 - protein, 98 aa, Homo sapiens
QVHLVESGGAVVQPGRSLRLSCAASGLSFSNYGMHWVRQAPGKGLEWVADIWFDRNDKNYADSVKGRFTISRDNSKNMVYLDMDSLTEEDTAVYYCAR

SEQ ID NO: 13674 - protein, 127 aa, Homo sapiens
QVHLVESGGAVVQPGRSLRLSCAASGLSFSNYGMHWVRQAPGKGLEWVADIWFDRNDKNYADSVKGRFTISRDNSKNMVYLDMDSLTEEDTAVYYCARGRTMSRGFSPATPTNFDYWGQGTLVIVSS

SEQ ID NO: 13675 - protein, 98 aa, Homo sapiens
QVHLVESGGDVVQPGRSLRLSCAASGFTSNLNALHWVRQAPARGLEWVALISSDASKTYYADSVKGRFTISRDNSKNTLYLQMNSLRPEDTAVYYCAR

SEQ ID NO: 13676 - protein, 127 aa, Homo sapiens
QVHLVESGGDVVQPGRSLRLSCAASGFTSNLNALHWVRQAPARGLEWVALISSDASKTYYADSVKGRFTISRDNSKNTLYLQMNSLRPEDTAVYYCARDPAHDSTGSYTWVGAFDIWGQGTTVTVSS

SEQ ID NO: 13677 - protein, 98 aa, Homo sapiens
QVHLVESGGGLVRPGGSLRLSCVASGFTFSDYALSWIRQAPGKGLEWVAFLSNTASAIYYADSLKGRFSISRDNAKNSLYLQMNSLRAEDTAVYYCVR

SEQ ID NO: 13678 - protein, 123 aa, Homo sapiens
QVHLVESGGGLVRPGGSLRLSCVASGFTFSDYALSWIRQAPGKGLEWVAFLSNTASAIYYADSLKGRFSISRDNAKNSLYLQMNSLRAEDTAVYYCVRVHTIFGVVRGYFDYWGQGTRVTVSS

SEQ ID NO: 13679 - protein, 98 aa, Homo sapiens
QVHLVESGGGLVRPGGSLRLSCVASGFTFSDYAMSWIRQAPGKGLEWVSFLSNTASAIYYADSLKGRFSISRDNAKNSLYLQMNSLRAEDTAVYYCVR

SEQ ID NO: 13680 - protein, 123 aa, Homo sapiens
QVHLVESGGGLVRPGGSLRLSCVASGFTFSDYAMSWIRQAPGKGLEWVSFLSNTASAIYYADSLKGRFSISRDNAKNSLYLQMNSLRAEDTAVYYCVRVYTIFGVVRGYFDYWGQGTRVTVSS

SEQ ID NO: 13681 - protein, 98 aa, Homo sapiens
QVHLVESGGGVVPPGRSLTLSCAAPTYTFSGHAVHWVRWTPGRGLEWISVIVYDGTNEFYADSVRGRFTISRDLSKDTVSLQMNNLRPEDTAMYYCAR

SEQ ID NO: 13682 - protein, 127 aa, Homo sapiens
QVHLVESGGGVVPPGRSLTLSCAAPTYTFSGHAVHWVRWTPGRGLEWISVIVYDGTNEFYADSVRGRFTISRDLSKDTVSLQMNNLRPEDTAMYYCARGGTNHCDHSCYWGGSFDLWGQGTLVTVSS

SEQ ID NO: 13683 - protein, 98 aa, Homo sapiens
QVHLVESGGGVVQPGRSLRLSCAASGFTFNNYGMHWVRQAPGKGLEWMAVIWYDGSNEDYADAVKGRFTISRDNSKNTLYLQMNSLRAEDTAVYYCAR

SEQ ID NO: 13684 - protein, 127 aa, Homo sapiens
QVHLVESGGGVVQPGRSLRLSCAASGFTFNNYGMHWVRQAPGKGLEWMAVIWYDGSNEDYADAVKGRFTISRDNSKNTLYLQMNSLRAEDTAVYYCARGPVDYDILTGYLDYGMDVWGQGTTVTVSS

SEQ ID NO: 13685 - protein, 98 aa, Homo sapiens
QVHLVESGGGVVQPGRSLRLSCAASGFTFSNYGMHWVRQPPGKGLEWVAVISYDGNNKYYPASVKGRFTISRDNSKNTLYLQMNSLRGEDRAVYYCAK

SEQ ID NO: 13686 - protein, 120 aa, Homo sapiens
QVHLVESGGGVVQPGRSLRLSCAASGFTFSNYGMHWVRQPPGKGLEWVAVISYDGNNKYYPASVKGRFTISRDNSKNTLYLQMNSLRGEDRAVYYCAKDLGILAAGTDYWGQGTPVIVSS

SEQ ID NO: 13687 - protein, 98 aa, Homo sapiens
QVHLVESGGGVVQPGRSLRLSCVASGFTFSSYGMHWVRQAPGKGLEWVAFIWYDGNNKYYTDSLKGRFTISRDNSKNTLYLQMNSLRADDTAVYYCAR

SEQ ID NO: 13688 - protein, 126 aa, Homo sapiens
QVHLVESGGGVVQPGRSLRLSCVASGFTFSSYGMHWVRQAPGKGLEWVAFIWYDGNNKYYTDSLKGRFTISRDNSKNTLYLQMNSLRADDTAVYYCARIGGGSRSYEDYYYGLDVWGQGTTVTVSS

SEQ ID NO: 13689 - protein, 98 aa, Homo sapiens
QVHLVQSEAEVKKPGASVTVSCRASGYNFNSYYVHWVRQVPGQGPEWMGWINPNSGGTDSAQKFQGRVAMTRDTSINTVYMELSSLRSDDTAVYYCVR

SEQ ID NO: 13690 - protein, 122 aa, Homo sapiens
QVHLVQSEAEVKKPGASVTVSCRASGYNFNSYYVHWVRQVPGQGPEWMGWINPNSGGTDSAQKFQGRVAMTRDTSINTVYMELSSLRSDDTAVYYCVRGKSWSGGHMGGVYWGQGALVTVSS

SEQ ID NO: 13691 - protein, 98 aa, Homo sapiens
QVHLVQSEAEVKKPGSSVKVSCKASGGTFNTYTFSWVRQAPGQGLEWMGGTLPIFGTANYAQKFQGRVTISADASTNTGYMELSSLRSEDTAVYYCAG

SEQ ID NO: 13692 - protein, 122 aa, Homo sapiens
QVHLVQSEAEVKKPGSSVKVSCKASGGTFNTYTFSWVRQAPGQGLEWMGGTLPIFGTANYAQKFQGRVTISADASTNTGYMELSSLRSEDTAVYYCAGTYNYDSSGYYNYYWGQGTLVTVSS

SEQ ID NO: 13693 - protein, 98 aa, Homo sapiens
QVHLVQSENETKKPGASVKVSCEGSGYIFSQYGISWVRQAPGQGLEWMGWISAYNGNTKSAQKFEGRVTLTTDTSTNTAYMELRSLRSDDTAVYYCTK

SEQ ID NO: 13694 - protein, 124 aa, Homo sapiens
QVHLVQSENETKKPGASVKVSCEGSGYIFSQYGISWVRQAPGQGLEWMGWISAYNGNTKSAQKFEGRVTLTTDTSTNTAYMELRSLRSDDTAVYYCTKGASFAYFHDNSPFDSWGQGTLVTVSS

SEQ ID NO: 13695 - protein, 98 aa, Homo sapiens
QVHLVQSGADMKTPGASVKISCQASGYSFTSNAIHWVRQDPGQRLEWVGGINTGNGKTEFSPKFQGRVTITRDTSATTVYMELRSLTSKDTAVYFCAR

SEQ ID NO: 13696 - protein, 121 aa, Homo sapiens
QVHLVQSGADMKTPGASVKISCQASGYSFTSNAIHWVRQDPGQRLEWVGGINTGNGKTEFSPKFQGRVTITRDTSATTVYMELRSLTSKDTAVYFCARVGYSGFINAFDVWGQGTMVIVSS

SEQ ID NO: 13697 - protein, 98 aa, Homo sapiens
QVHLVQSGAEAKKPGASVMVSCKASGFRFRDYYLHWVRQAPGQGPEWMAWIKVKNGDTKYTERFKGRVSVTWDSSLSTLYMDLRSLTSDDTAVYYCVR

SEQ ID NO: 13698 - protein, 123 aa, Homo sapiens
QVHLVQSGAEAKKPGASVMVSCKASGFRFRDYYLHWVRQAPGQGPEWMAWIKVKNGDTKYTERFKGRVSVTWDSSLSTLYMDLRSLTSDDTAVYYCVRGIWRDDFKYDAFDIWGQGTMVTVSS

SEQ ID NO: 13699 - protein, 98 aa, Homo sapiens
QVHLVQSGAEMKKPGASVRVSCKTSGYTFSYYGLSWIRQAPGQGFEWVGWISGYNGDTTYSQKLQGRVTLTTDTSTGAAYMELRSLRPDDTAVYYCAR

SEQ ID NO: 13700 - protein, 130 aa, Homo sapiens
QVHLVQSGAEMKKPGASVRVSCKTSGYTFSYYGLSWIRQAPGQGFEWVGWISGYNGDTTYSQKLQGRVTLTTDTSTGAAYMELRSLRPDDTAVYYCARDWVGKIHGSGSLYSDRNYFDTWGQGTLVTVSS

SEQ ID NO: 13701 - protein, 97 aa, Homo sapiens
QVHLVQSGAEVAKPGSSVTVSCKASGVIFNSYSISWVRQAPGQGLEWMGGIMPIFGSTKYAQKFQGRVAITADQSTSTAFMALSDLTFEDSAVYYCA

SEQ ID NO: 13702 - protein, 123 aa, Homo sapiens
QVHLVQSGAEVAKPGSSVTVSCKASGVIFNSYSISWVRQAPGQGLEWMGGIMPIFGSTKYAQKFQGRVAITADQSTSTAFMALSDLTFEDSAVYYCARQAIGGTDYYHYYMDVWGKGTTVTVS

SEQ ID NO: 13703 - protein, 98 aa, Homo sapiens
QVHLVQSGAEVKKPGASVKLSCKASGYTFNSYAIHWVRQAPGQRPEWMGWINAGNDETEYAQKFQGRVTITRDTSASTAYMELRSLKSEDTAVYYCAR

SEQ ID NO: 13704 - protein, 128 aa, Homo sapiens
QVHLVQSGAEVKKPGASVKLSCKASGYTFNSYAIHWVRQAPGQRPEWMGWINAGNDETEYAQKFQGRVTITRDTSASTAYMELRSLKSEDTAVYYCARDARVVVVPGSRYYFYYMDVWGKGTSVTVSS

SEQ ID NO: 13705 - protein, 98 aa, Homo sapiens
QVHLVQSGAEVKKPGASVKVSCKASGYTFTTYGINWVRQAPGQGLEWMGWISAYNGNTNYVKKFQGRVTMTTDTSTSTAYMELTSLRFDDTAVYYCAR

SEQ ID NO: 13706 - protein, 125 aa, Homo sapiens
QVHLVQSGAEVKKPGASVKVSCKASGYTFTTYGINWVRQAPGQGLEWMGWISAYNGNTNYVKKFQGRVTMTTDTSTSTAYMELTSLRFDDTAVYYCARDLGGYFAFNHYYYMDLWGEGTTVTVSS

SEQ ID NO: 13707 - protein, 97 aa, Homo sapiens
QVHLVQSGAEVKKPGASVKVSCKASGYTFTTYGISWVRQAPGQGLEWMGWISAYNGNTNYAQKFQGRVTMTTDTSTSTAYMELRSLRSDDTAVYYCA

SEQ ID NO: 13708 - protein, 123 aa, Homo sapiens
QVHLVQSGAEVKKPGASVKVSCKASGYTFTTYGISWVRQAPGQGLEWMGWISAYNGNTNYAQKFQGRVTMTTDTSTSTAYMELRSLRSDDTAVYYCARVLGGYVYYFYGMDVWGQGTTVTVSS

SEQ ID NO: 13709 - protein, 97 aa, Homo sapiens
QVHLVQSGAEVKKPGSSVIVSCRASGGTLNKYAISWVRQAPGQGLEWMGGNIPIFGAAKYAQKFQGRVTITTDESTSTAHMELSSLRSEDTAMYFCA

SEQ ID NO: 13710 - protein, 122 aa, Homo sapiens
QVHLVQSGAEVKKPGSSVIVSCRASGGTLNKYAISWVRQAPGQGLEWMGGNIPIFGAAKYAQKFQGRVTITTDESTSTAHMELSSLRSEDTAMYFCAGAESYSLLREVLIYWGQGTLVTVSS

SEQ ID NO: 13711 - protein, 97 aa, Homo sapiens
QVHLVQSGAEVKKPGSSVKVACETSGDSFNTSILSWVRQAPGQGLEWMGKIVAIVNTAQYAPKFQDKVTLSADTSTTTAYMELHSLTSEDTAVYYCA

SEQ ID NO: 13712 - protein, 116 aa, Homo sapiens
QVHLVQSGAEVKKPGSSVKVACETSGDSFNTSILSWVRQAPGQGLEWMGKIVAIVNTAQYAPKFQDKVTLSADTSTTTAYMELHSLTSEDTAVYYCAEGDTTLDSWGQGTLVTVSS

SEQ ID NO: 13713 - protein, 97 aa, Homo sapiens
QVHLVQSGAEVKKPGSSVKVSCKASGDTFNGYAINWVRQAPGQGLEWMGGIIPIFGTANYAQKFQGRVTITADTLTGTTYLELSSLRSEDTAVYFCA

SEQ ID NO: 13714 - protein, 126 aa, Homo sapiens
QVHLVQSGAEVKKPGSSVKVSCKASGDTFNGYAINWVRQAPGQGLEWMGGIIPIFGTANYAQKFQGRVTITADTLTGTTYLELSSLRSEDTAVYFCARRRNQYESSGYYKSPFDPWGQGTLVTVSS

SEQ ID NO: 13715 - protein, 97 aa, Homo sapiens
QVHLVQSGAEVKKPGSSVKVSCKASGGTFNSYTINWVRQAPGQGLEWMGRIIPLLGISNNAQKFQGRVTITADKSPSTAYMELSSLRSEDTAVYYCA

SEQ ID NO: 13716 - protein, 123 aa, Homo sapiens
QVHLVQSGAEVKKPGSSVKVSCKASGGTFNSYTINWVRQAPGQGLEWMGRIIPLLGISNNAQKFQGRVTITADKSPSTAYMELSSLRSEDTAVYYCATSHSTTYYKGYYFEYWGLGTLVTVSS

SEQ ID NO: 13717 - protein, 98 aa, Homo sapiens
QVHLVQSGAEVKKPGSSVKVSCKASGGTFSNFPIGWVRQAPGQGLEWVGGLIPVFGTPKYAQKFQGRVTITADGSTSTAYMELSSLRSEDTAVYYCAR

SEQ ID NO: 13718 - protein, 125 aa, Homo sapiens
QVHLVQSGAEVKKPGSSVKVSCKASGGTFSNFPIGWVRQAPGQGLEWVGGLIPVFGTPKYAQKFQGRVTITADGSTSTAYMELSSLRSEDTAVYYCARLLKKGVDWNPHLYFDYWGQGTMVTVSS

SEQ ID NO: 13719 - protein, 98 aa, Homo sapiens
QVHLVQSGAEVKKPGSSVKVSCKASGGTFSSYTISWVRQAPGQGLEWMGGIIPMFGTANYGQKFQDRVTITADESTSTAYMELSSLRSEDTAVYYCAR

SEQ ID NO: 13720 - protein, 124 aa, Homo sapiens
QVHLVQSGAEVKKPGSSVKVSCKASGGTFSSYTISWVRQAPGQGLEWMGGIIPMFGTANYGQKFQDRVTITADESTSTAYMELSSLRSEDTAVYYCARATGTTSGHFYYYIDVWGKGTSVTVSS

SEQ ID NO: 13721 - protein, 98 aa, Homo sapiens
QVHLVQSGAEVKKPGSSVKVSCKASGGTFSTYGITWVRQAPGQGLEWMGGIIPIFDTAKYAQKFQGRVTITADRSTNTASMELSGLRSEDTAMYFCAR

SEQ ID NO: 13722 - protein, 125 aa, Homo sapiens
QVHLVQSGAEVKKPGSSVKVSCKASGGTFSTYGITWVRQAPGQGLEWMGGIIPIFDTAKYAQKFQGRVTITADRSTNTASMELSGLRSEDTAMYFCARGRIAGTKSAHYYYGMDVWGQGTTVTVS

SEQ ID NO: 13723 - protein, 105 aa, Homo sapiens
QVHLVQSGAEVKKPGSSVKVSCKASGGTLSTYAMTWVRQAPGQGLEWMGGIIPMFGTPNYAQKFQGRLTIMADKSTFLADKSTSTAYMELRSLRPEDTAMYYCLR

SEQ ID NO: 13724 - protein, 132 aa, Homo sapiens
QVHLVQSGAEVKKPGSSVKVSCKASGGTLSTYAMTWVRQAPGQGLEWMGGIIPMFGTPNYAQKFQGRLTIMADKSTFLADKSTSTAYMELRSLRPEDTAMYYCLRDPLGGYCSGDNCRGDYWGQGTLVTVSS

SEQ ID NO: 13725 - protein, 98 aa, Homo sapiens
QVHLVQSGAEVKKPGSSVKVSCKASGVTFSGNAISWVRQAPGQGLEWVGGISPIFGTTNYAQKFQGRVTITADASTSTAYMELSSLRSEDTAVYYCAR

SEQ ID NO: 13726 - protein, 122 aa, Homo sapiens
QVHLVQSGAEVKKPGSSVKVSCKASGVTFSGNAISWVRQAPGQGLEWVGGISPIFGTTNYAQKFQGRVTITADASTSTAYMELSSLRSEDTAVYYCARAQKYYFESSGYPNWGQGTLVTVSS

SEQ ID NO: 13727 - protein, 97 aa, Homo sapiens
QVHLVQSGAEVKKPGSSVKVSCKATGGIFNKYGINWVRQAPGQGLEWMGGISAVFGTAGYAQKFQGRVTITADESTTTAYMELSSLRSEDTAVYYCA

SEQ ID NO: 13728 - protein, 121 aa, Homo sapiens
QVHLVQSGAEVKKPGSSVKVSCKATGGIFNKYGINWVRQAPGQGLEWMGGISAVFGTAGYAQKFQGRVTITADESTTTAYMELSSLRSEDTAVYYCAGARTYYYDNFFVSWGLGTPVTVSS

SEQ ID NO: 13729 - protein, 98 aa, Homo sapiens
QVHLVQSGAEVKKPGSSVKVSCKSSGNTFQSNSFSWVRQAPGQGLEWMGGIIAIFRTAKYSEKFQGRVTITTDEFTTTAYMELSSLRSEDTAVYYCVR

SEQ ID NO: 13730 - protein, 123 aa, Homo sapiens
QVHLVQSGAEVKKPGSSVKVSCKSSGNTFQSNSFSWVRQAPGQGLEWMGGIIAIFRTAKYSEKFQGRVTITTDEFTTTAYMELSSLRSEDTAVYYCVRGDGYNLLQSNPALSWGQGTLVIVSS

SEQ ID NO: 13731 - protein, 98 aa, Homo sapiens
QVHLVQSGAEVKKPGSSVKVSCQASGGPFSAFAINWVRLAPGQGLEWVGGIIGMFGVTKYAQKFQDRITITADESTSTGYMELRSLRSEDTAMYYCAR

SEQ ID NO: 13732 - protein, 121 aa, Homo sapiens
QVHLVQSGAEVKKPGSSVKVSCQASGGPFSAFAINWVRLAPGQGLEWVGGIIGMFGVTKYAQKFQDRITITADESTSTGYMELRSLRSEDTAMYYCARSSGYTLRGRLDPWGQGTLVTVSS

SEQ ID NO: 13733 - protein, 98 aa, Homo sapiens
QVHLVQSGAEVKKPGSSVKVSCQASGGTFSSYAISWVRQAPGQGLEWVGGIIGMFGTPNYGQKFQGRVTITADEITSTAYMELRSLTSEDTAVYYCAR

SEQ ID NO: 13734 - protein, 120 aa, Homo sapiens
QVHLVQSGAEVKKPGSSVKVSCQASGGTFSSYAISWVRQAPGQGLEWVGGIIGMFGTPNYGQKFQGRVTITADEITSTAYMELRSLTSEDTAVYYCARGIYYYLSYLAYWGQGTLVTVSS

SEQ ID NO: 13735 - protein, 98 aa, Homo sapiens
QVHLVQSGAEVKKPGSSVKVSCRASEGTFSSFAFSWVRQAPGQGLEWMGGIIGMFGVPKYAQKMEGRVRITTDESTSTSYMELRSLRSEDTAVYYCAR

SEQ ID NO: 13736 - protein, 122 aa, Homo sapiens
QVHLVQSGAEVKKPGSSVKVSCRASEGTFSSFAFSWVRQAPGQGLEWMGGIIGMFGVPKYAQKMEGRVRITTDESTSTSYMELRSLRSEDTAVYYCARHGGYHYNYNAMEDWGQGTPVTVSS

SEQ ID NO: 13737 - protein, 95 aa, Homo sapiens
QVHLVQSGAEVKKPGSSVRVSCEASGGTFSRSSIGWVRQAPGQGLEWLGSVIPTLGITNYAQRFQGRITISASRTTAYMEVRSLRSEDTAVYYCA

SEQ ID NO: 13738 - protein, 119 aa, Homo sapiens
QVHLVQSGAEVKKPGSSVRVSCEASGGTFSRSSIGWVRQAPGQGLEWLGSVIPTLGITNYAQRFQGRITISASRTTAYMEVRSLRSEDTAVYYCASHDEPLWSPYFDYWGQGTLLTVSS

SEQ ID NO: 13739 - protein, 96 aa, Homo sapiens
QVHLVQSGAEVKKPGSSVTVSCAASGDNFNNYVVNWVRQAPGQGLEWMGGITPIFPLTHVAQQFQGRVSFTADEATTVAYMDLASLTSEDTAMYYC

SEQ ID NO: 13740 - protein, 127 aa, Homo sapiens
QVHLVQSGAEVKKPGSSVTVSCAASGDNFNNYVVNWVRQAPGQGLEWMGGITPIFPLTHVAQQFQGRVSFTADEATTVAYMDLASLTSEDTAMYYCSLSKWDAPAEQVMPVGGLEVWGQGSQVTVSS

SEQ ID NO: 13741 - protein, 97 aa, Homo sapiens
QVHLVQSGAEVRKPGSSVKVSCKASGGIFSFYAINWVRQAPGQGLEWMGGTIPIFGTPKYAQSFQGRVSIIADKSTSTVYMELSSLRSEDTAVYYCA

SEQ ID NO: 13742 - protein, 123 aa, Homo sapiens
QVHLVQSGAEVRKPGSSVKVSCKASGGIFSFYAINWVRQAPGQGLEWMGGTIPIFGTPKYAQSFQGRVSIIADKSTSTVYMELSSLRSEDTAVYYCAKSSSQGYSSSWYIDDWGQGTLVTVSS

SEQ ID NO: 13743 - protein, 98 aa, Homo sapiens
QVHLVQSGAGVKKPGSSVKVSCKASGGSFSSDAINWVRQAPGQGLEWMGGIIPALGSGNYAQNFQGRVTITADEPTTTVYLELTSLRSQDTAVYYCAR

SEQ ID NO: 13744 - protein, 128 aa, Homo sapiens
QVHLVQSGAGVKKPGSSVKVSCKASGGSFSSDAINWVRQAPGQGLEWMGGIIPALGSGNYAQNFQGRVTITADEPTTTVYLELTSLRSQDTAVYYCARGGGAGSSTFDYQYYYYMDVWGRGTTVTVSS

SEQ ID NO: 13745 - protein, 98 aa, Homo sapiens
QVHLVQSGGEVKKAGASVKVSCKTSGYTFTNYGVTWVRQAPGQGLEWMGWISAYTGNTHYAQKFQDRLTMTTDTSTSTAYMEMRSLRSDDTAVYFCVR

SEQ ID NO: 13746 - protein, 126 aa, Homo sapiens
QVHLVQSGGEVKKAGASVKVSCKTSGYTFTNYGVTWVRQAPGQGLEWMGWISAYTGNTHYAQKFQDRLTMTTDTSTSTAYMEMRSLRSDDTAVYFCVRDRVQGQVWFGSDGRMDYWGLGTLVTVSS

SEQ ID NO: 13747 - protein, 97 aa, Homo sapiens
QVHLVQSGSEVRKPGASVNVSCKASGYTFVYYGFNWLRQAPGQGLEWMAWISAYNGNTEYAQKFQGRVTVTTDTSTSTAYLDVGSLQSDDTAVYYCA

SEQ ID NO: 13748 - protein, 122 aa, Homo sapiens
QVHLVQSGSEVRKPGASVNVSCKASGYTFVYYGFNWLRQAPGQGLEWMAWISAYNGNTEYAQKFQGRVTVTTDTSTSTAYLDVGSLQSDDTAVYYCARAPPSTLAARWNDYWGQGTLVTVSS

SEQ ID NO: 13749 - protein, 97 aa, Homo sapiens
QVHLVQSGTEVKKPGSSVKVSCKASGGPFVSYAIIWVRQVPGQGLEWMGGIIPIFGSPNYAQKFQGRVTITTDESTRSAYMELRSLRFEDTAVYFCA

SEQ ID NO: 13750 - protein, 121 aa, Homo sapiens
QVHLVQSGTEVKKPGSSVKVSCKASGGPFVSYAIIWVRQVPGQGLEWMGGIIPIFGSPNYAQKFQGRVTITTDESTRSAYMELRSLRFEDTAVYFCASRYSENYNSAFDVWGQGTVVTVSS

SEQ ID NO: 13751 - protein, 98 aa, Homo sapiens
QVHLVQSGVEVKKPGASVKVSCKASGYTFTTHGISWVRQAPGQGLEWMGWISGYNGHTNFAQNFQGRVTMSTDPSTSTAFMELKSLGSDDTALYYCAR

SEQ ID NO: 13752 - protein, 122 aa, Homo sapiens
QVHLVQSGVEVKKPGASVKVSCKASGYTFTTHGISWVRQAPGQGLEWMGWISGYNGHTNFAQNFQGRVTMSTDPSTSTAFMELKSLGSDDTALYYCARDRRDILTGYTADYWGQGTLVIVSS

SEQ ID NO: 13753 - protein, 97 aa, Homo sapiens
QVKLLESGPRLVKPSETLSLSCTVSDDSITSYYWTWIRQTPGKGLEWIGFIHISGNTNYNPSLKGRLTMTIDATKDQFSLKLTSVTAADTAVYYCAR

SEQ ID NO: 13754 - protein, 124 aa, Homo sapiens
QVKLLESGPRLVKPSETLSLSCTVSDDSITSYYWTWIRQTPGKGLEWIGFIHISGNTNYNPSLKGRLTMTIDATKDQFSLKLTSVTAADTAVYYCARHTFSRSRRHFYYYMDVWGIGTTVTVSS

SEQ ID NO: 13755 - protein, 98 aa, Homo sapiens
QVKLVESGGGGVRPGGSLRLSCEASGFTFSTYGLHWVRQAPGKGLEWVAVISYDGSKKFYADFVKGRFTISRDNSKNTLYMEMNRLRAEDTSVYYCAK

SEQ ID NO: 13756 - protein, 121 aa, Homo sapiens
QVKLVESGGGGVRPGGSLRLSCEASGFTFSTYGLHWVRQAPGKGLEWVAVISYDGSKKFYADFVKGRFTISRDNSKNTLYMEMNRLRAEDTSVYYCAKSEGDYELFGLVTWGQGTLVTVSS

SEQ ID NO: 13757 - protein, 99 aa, Homo sapiens
QVKLVQSGAEMKKPGASVKVSCKASGYTFTDYDINWVRQASGQGLEWMGWMNPNSGNRGYARKFQGRVTMTRDTSISTAYMELSSLRSEDAAVYYCARG

SEQ ID NO: 13758 - protein, 124 aa, Homo sapiens
QVKLVQSGAEMKKPGASVKVSCKASGYTFTDYDINWVRQASGQGLEWMGWMNPNSGNRGYARKFQGRVTMTRDTSISTAYMELSSLRSEDAAVYYCARGPTYYEHSDYFPGDSWGQGTLVTVPS

SEQ ID NO: 13759 - protein, 97 aa, Homo sapiens
QVKLVQSGAEVKKPGSSVTLSCKASGVIFNGYSITWVRQAPGQGLEWMGGIIPIFGTTKYAQRFQGRVTITADESTSTAHMELSSLRFGDTAVYYCA

SEQ ID NO: 13760 - protein, 123 aa, Homo sapiens
QVKLVQSGAEVKKPGSSVTLSCKASGVIFNGYSITWVRQAPGQGLEWMGGIIPIFGTTKYAQRFQGRVTITADESTSTAHMELSSLRFGDTAVYYCARQAMTATTYYNYYMDVWGEGTTVIVS

SEQ ID NO: 13761 - protein, 98 aa, Homo sapiens
QVLLEQSGAEVKKPGSSVRVSCKASGVAFSKYAINWVRQAPGQGLEWIGGIMPIFHVTKYAQRFQGRVTITADETTTTSYLDLNSLRSEDTAVYYCAR

SEQ ID NO: 13762 - protein, 123 aa, Homo sapiens
QVLLEQSGAEVKKPGSSVRVSCKASGVAFSKYAINWVRQAPGQGLEWIGGIMPIFHVTKYAQRFQGRVTITADETTTTSYLDLNSLRSEDTAVYYCARDGSGNYYKDWYFDLWGRGTLITVSS

SEQ ID NO: 13763 - protein, 98 aa, Homo sapiens
QVLLEQSGSEVKKPGASVKVSCKASGYSFSNHAINWVRQAPGQGLEWMGWISAHNGDTKFEEKFQGRVTMTTDTSTTTAYMELRSLRSDDTAVYYCAR

SEQ ID NO: 13764 - protein, 126 aa, Homo sapiens
QVLLEQSGSEVKKPGASVKVSCKASGYSFSNHAINWVRQAPGQGLEWMGWISAHNGDTKFEEKFQGRVTMTTDTSTTTAYMELRSLRSDDTAVYYCARGWRPRDETSGYYSWVDSWGQGTLVTVSS

SEQ ID NO: 13765 - protein, 98 aa, Homo sapiens
QVLLIQSGAEVKKPGASVRVSCKVSGHTLSELAIHWVRQAHGKGLEWMGGLDPEDGERSYEEKFQGRLTMTEDTSTDTAYMELSSLRSEDTAMYYCAT

SEQ ID NO: 13766 - protein, 122 aa, Homo sapiens
QVLLIQSGAEVKKPGASVRVSCKVSGHTLSELAIHWVRQAHGKGLEWMGGLDPEDGERSYEEKFQGRLTMTEDTSTDTAYMELSSLRSEDTAMYYCATGKYCSLTTCVFDSWGQGILVTVSS

SEQ ID NO: 13767 - protein, 98 aa, Homo sapiens
QVLLQESGPGLVKPSETLSLTCVVSGYSISGGYNWGWIRQPPGKGLEWIGAIYHSGSTYFNPSLRSRVTMSLDTSNNQFSLKLRSVTAADTAVYYCAR

SEQ ID NO: 13768 - protein, 122 aa, Homo sapiens
QVLLQESGPGLVKPSETLSLTCVVSGYSISGGYNWGWIRQPPGKGLEWIGAIYHSGSTYFNPSLRSRVTMSLDTSNNQFSLKLRSVTAADTAVYYCARSNSSPYQGRLFDYWGQGTLVTVSS

SEQ ID NO: 13769 - protein, 98 aa, Homo sapiens
QVLLVQSGAELKKPGSSVKVSCKTSGGTFNSHAISWVRQAPGQGLEWMGGITGMFRTTYYVQKFQGRVTITADEFMTTVYLELNSLTSEDTAIYYCAR

SEQ ID NO: 13770 - protein, 120 aa, Homo sapiens
QVLLVQSGAELKKPGSSVKVSCKTSGGTFNSHAISWVRQAPGQGLEWMGGITGMFRTTYYVQKFQGRVTITADEFMTTVYLELNSLTSEDTAIYYCARGQTYYFSHMDVWGEGTTVTVSS

SEQ ID NO: 13771 - protein, 98 aa, Homo sapiens
QVLLVQSGAEVKKPGASVKVSCKASRYSFTDYYIHWVRQAPGQGLEWMGWINPNSGGTNYAQKFQGRVTMTRDTSISTAYMELSSLRSDDTAVYYCAR

SEQ ID NO: 13772 - protein, 115 aa, Homo sapiens
QVLLVQSGAEVKKPGASVKVSCKASRYSFTDYYIHWVRQAPGQGLEWMGWINPNSGGTNYAQKFQGRVTMTRDTSISTAYMELSSLRSDDTAVYYCARNFAWDYWGQGTLVTVSS

SEQ ID NO: 13773 - protein, 98 aa, Homo sapiens
QVLLVQSGAEVKKPGASVRVSCKVSGHTLRELCIHWVRQAHGKGLEWMGGLDPEDGERTYEQKFQGRITMTEDTSTDTVYMELSSLRSEDTAMYYCAT

SEQ ID NO: 13774 - protein, 122 aa, Homo sapiens
QVLLVQSGAEVKKPGASVRVSCKVSGHTLRELCIHWVRQAHGKGLEWMGGLDPEDGERTYEQKFQGRITMTEDTSTDTVYMELSSLRSEDTAMYYCATGKYCSLTTCVFDYWGQGILVSVSS

SEQ ID NO: 13775 - protein, 98 aa, Homo sapiens
QVLLVQSGAEVKKPGSSVRVSCKASGVTFSKYAINWVRQAPGQGLEWMGGIMPIFHITKYAQRFQGRVTITADESTTTSYMELNSLTSEDTAVYYCAR

SEQ ID NO: 13776 - protein, 123 aa, Homo sapiens
QVLLVQSGAEVKKPGSSVRVSCKASGVTFSKYAINWVRQAPGQGLEWMGGIMPIFHITKYAQRFQGRVTITADESTTTSYMELNSLTSEDTAVYYCARDGSGNYYKDWYFDLWGRGTLITVSS

SEQ ID NO: 13777 - protein, 98 aa, Homo sapiens
QVLLVQSGAEVKQPGSSVKVSCRASGGTFRSDAISWVRQAPGGGLEWMGGIIGIFRTTKYAQKFQGRVTITADEFMNTANMELRSLRYEDTAVYYCAR

SEQ ID NO: 13778 - protein, 120 aa, Homo sapiens
QVLLVQSGAEVKQPGSSVKVSCRASGGTFRSDAISWVRQAPGGGLEWMGGIIGIFRTTKYAQKFQGRVTITADEFMNTANMELRSLRYEDTAVYYCARGSGYKYEYFQSWGQGTRVTVSS

SEQ ID NO: 13779 - protein, 98 aa, Homo sapiens
QVLLVQSGPEVKKPGASVKVSCKASGYTFTSSDIHWVRRAPGQRLEWMGWINSDNGHTKYSQKFQDRVTITRDTSATTAYMELSSLRSEDTAMYYCAK

SEQ ID NO: 13780 - protein, 128 aa, Homo sapiens
QVLLVQSGPEVKKPGASVKVSCKASGYTFTSSDIHWVRRAPGQRLEWMGWINSDNGHTKYSQKFQDRVTITRDTSATTAYMELSSLRSEDTAMYYCAKDPRTGHCDKTDCSVAYWFDPWGQGTLVTVT

SEQ ID NO: 13781 - protein, 96 aa, Homo sapiens
QVPLQESGPGLVKPSETLSLTCTVSGASITNYYCNWIRQAPGKGLEWIGYISGGGSTNYNPSLRSRVTISLDTSNNQFSLKLTSVTVADTAVYYCA

SEQ ID NO: 13782 - protein, 122 aa, Homo sapiens
QVPLQESGPGLVKPSETLSLTCTVSGASITNYYCNWIRQAPGKGLEWIGYISGGGSTNYNPSLRSRVTISLDTSNNQFSLKLTSVTVADTAVYYCATAPLGGPIMRRYFDLWGRGTLVTVSS

SEQ ID NO: 13783 - protein, 98 aa, Homo sapiens
QVPLVQSGAEVKKPGSSVRVSCKASGGTFQTHAFSWVRQAPGQGLEWMGGITPMFRTTTYAQKFQGRITITTDEFMSTAYMDLSSLRSEDTAVYYCAR

SEQ ID NO: 13784 - protein, 123 aa, Homo sapiens
QVPLVQSGAEVKKPGSSVRVSCKASGGTFQTHAFSWVRQAPGQGLEWMGGITPMFRTTTYAQKFQGRITITTDEFMSTAYMDLSSLRSEDTAVYYCARENRYNFGSGSFWAVWGQGTTVTVSS

SEQ ID NO: 13785 - protein, 5 aa, Homo sapiens
QVQET

SEQ ID NO: 13786 - protein, 98 aa, Homo sapiens
QVQFVQSGAAVKKPGASVNVSCQASGYTFSIYAMHWVRQVPGQRLEWVGWISADSDNTKYSQKFQDRVTITRDTSANTVYMELSSLTSEDTAVYFCAR

SEQ ID NO: 13787 - protein, 130 aa, Homo sapiens
QVQFVQSGAAVKKPGASVNVSCQASGYTFSIYAMHWVRQVPGQRLEWVGWISADSDNTKYSQKFQDRVTITRDTSANTVYMELSSLTSEDTAVYFCARDPKPYDGNPLTALSFYHYMDVWGQGTTVIVSS

SEQ ID NO: 13788 - protein, 97 aa, Homo sapiens
QVQFVQSGTEVKKPGASVKVSCKASGDSFTTHAMHWVRQAPGQRPEWMGWIHTYNGNSKYSQKFLGRVTFTRDTSATVVYMELSSLTSEDTSVYYCA

SEQ ID NO: 13789 - protein, 121 aa, Homo sapiens
QVQFVQSGTEVKKPGASVKVSCKASGDSFTTHAMHWVRQAPGQRPEWMGWIHTYNGNSKYSQKFLGRVTFTRDTSATVVYMELSSLTSEDTSVYYCATDRGVAESTYFDSWGQGTLVTVSS

SEQ ID NO: 13790 - protein, 96 aa, Homo sapiens
QVQIQQWGTGLLKPSETLSLTCGAHGGAFNDYFWTWVRHVPGNGPEWIGEIHHSGNTNYNPSLNGRVTLTLDMAKHQFSLILTSVTAADTGIYYCV

SEQ ID NO: 13791 - protein, 118 aa, Homo sapiens
QVQIQQWGTGLLKPSETLSLTCGAHGGAFNDYFWTWVRHVPGNGPEWIGEIHHSGNTNYNPSLNGRVTLTLDMAKHQFSLILTSVTAADTGIYYCVKHVAGNQAFDLWGPGTLVTVSS

SEQ ID NO: 13792 - protein, 98 aa, Homo sapiens
QVQLAESGGGVVQPGRSLRLSCAASGFTFNNFAMYWVRQAPGKGLESVAVISYDGSNKYYADSVRGRFTISRDNSKNTLFLQVNNLRTEDSAVYYCAR

SEQ ID NO: 13793 - protein, 122 aa, Homo sapiens
QVQLAESGGGVVQPGRSLRLSCAASGFTFNNFAMYWVRQAPGKGLESVAVISYDGSNKYYADSVRGRFTISRDNSKNTLFLQVNNLRTEDSAVYYCARDRLRIVLAGTGPHWGQGTLVIVSS

SEQ ID NO: 13794 - protein, 98 aa, Homo sapiens
QVQLAESGGGVVQPGRSLRLSCTTSGFTFSTYGMHWVRQAPGKGLEWVAVISYDGSNKYYADSVKGRFTISRDSSRNTLYLQMNSLRVEDTAVYYCAK

SEQ ID NO: 13795 - protein, 120 aa, Homo sapiens
QVQLAESGGGVVQPGRSLRLSCTTSGFTFSTYGMHWVRQAPGKGLEWVAVISYDGSNKYYADSVKGRFTISRDSSRNTLYLQMNSLRVEDTAVYYCAKDAEYINYGGHYWGQGTLVTVSS

SEQ ID NO: 13796 - protein, 98 aa, Homo sapiens
QVQLAQSGAEVKKPGASVKVSCKVSGYTVSDLAIHWVRQGPGKGLEWMGGFDRIAGKRNYAQKFQGRVLMTEDRSTNTAYMELNRLRSDDTAVYFCAT

SEQ ID NO: 13797 - protein, 125 aa, Homo sapiens
QVQLAQSGAEVKKPGASVKVSCKVSGYTVSDLAIHWVRQGPGKGLEWMGGFDRIAGKRNYAQKFQGRVLMTEDRSTNTAYMELNRLRSDDTAVYFCATEYMLGPSIGPFDAFDIWGQGTLVTVSS

SEQ ID NO: 13798 - protein, 101 aa, Homo sapiens
QVQLAQSGAEVKKPGSSVKVSCKVSGDSVITFSSHALSWVRQAPGQGLEWMGGISPILRTAVYAQKFQGRVTITADESTTTAYLELSSLRSEDTAVYYCAR

SEQ ID NO: 13799 - protein, 125 aa, Homo sapiens
QVQLAQSGAEVKKPGSSVKVSCKVSGDSVITFSSHALSWVRQAPGQGLEWMGGISPILRTAVYAQKFQGRVTITADESTTTAYLELSSLRSEDTAVYYCARLSKGHYYYHYMDVWGKGTTVTVSS

SEQ ID NO: 13800 - protein, 98 aa, Homo sapiens
QVQLAQSGAEVRKPGASVKVSCKASGYTFTDYYIHWVRQAPGQGLEWMGWINPDSGRTNYAQRFQGRVSMTSDTSISTAYMDLSRLRSDDTAVYFCAR

SEQ ID NO: 13801 - protein, 120 aa, Homo sapiens
QVQLAQSGAEVRKPGASVKVSCKASGYTFTDYYIHWVRQAPGQGLEWMGWINPDSGRTNYAQRFQGRVSMTSDTSISTAYMDLSRLRSDDTAVYFCAREGAHNYQHFDHWGQGTLVTVSA

SEQ ID NO: 13802 - protein, 98 aa, Homo sapiens
QVQLEQSGAEAKKPGASLKVSCEGSGYIFSNYGITWVRQAPGQGLEWMGWISAYNGNTNYAQKFQGRVTMTTDTSTNTAYMELRSLRSDDTAVYYCAR

SEQ ID NO: 13803 - protein, 124 aa, Homo sapiens
QVQLEQSGAEAKKPGASLKVSCEGSGYIFSNYGITWVRQAPGQGLEWMGWISAYNGNTNYAQKFQGRVTMTTDTSTNTAYMELRSLRSDDTAVYYCARGASFAYFHDNSPLDSWGQGTLVTVSS

SEQ ID NO: 13804 - protein, 98 aa, Homo sapiens
QVQLEQSGAEAKKPGASVKVSCKGFGYIFSNYGITWVRQAPGQGLEWMGWISAYNGNTNSAQKFQDRVTLTTDTSTSTAYMELRSLKSDDTAVYYCAR

SEQ ID NO: 13805 - protein, 124 aa, Homo sapiens
QVQLEQSGAEAKKPGASVKVSCKGFGYIFSNYGITWVRQAPGQGLEWMGWISAYNGNTNSAQKFQDRVTLTTDTSTSTAYMELRSLKSDDTAVYYCARGASFAYFQDNSPLDSWGQGTLVTVSS

SEQ ID NO: 13806 - protein, 97 aa, Homo sapiens
QVQLEQSGAELKKPGSSVRVSCTASGGKFNNNAVSWLRQAPGQGLEWMGGINPMFRIVNYAQKFQGRLTITADALPSTAYMELNSLTSDDTAVYYCA

SEQ ID NO: 13807 - protein, 122 aa, Homo sapiens
QVQLEQSGAELKKPGSSVRVSCTASGGKFNNNAVSWLRQAPGQGLEWMGGINPMFRIVNYAQKFQGRLTITADALPSTAYMELNSLTSDDTAVYYCARGPNYHDTTTYYDPWGPGTVVIVSS

SEQ ID NO: 13808 - protein, 97 aa, Homo sapiens
QVQLEQSGAELRKPGAPVTVSCKTSGYTFNNYGITWVRQAPGQGLDWMGWISSYGNTKYAQKLQGRVTMTTDTSTTTAYMELRSLRFDDTAVYFCAR

SEQ ID NO: 13809 - protein, 116 aa, Homo sapiens
QVQLEQSGAELRKPGAPVTVSCKTSGYTFNNYGITWVRQAPGQGLDWMGWISSYGNTKYAQKLQGRVTMTTDTSTTTAYMELRSLRFDDTAVYFCARGRQPPFDFWGQGTLVTVSS

SEQ ID NO: 13810 - protein, 98 aa, Homo sapiens
QVQLEQSGAETKKPGSSVKVSCKVSGGRFSAYAIGWVRQAPGQGLEWIGGINPMFGIVNYAEKFQGRVTISADTFPSMSYMELRSLTSEDTAVYFCAR

SEQ ID NO: 13811 - protein, 122 aa, Homo sapiens
QVQLEQSGAETKKPGSSVKVSCKVSGGRFSAYAIGWVRQAPGQGLEWIGGINPMFGIVNYAEKFQGRVTISADTFPSMSYMELRSLTSEDTAVYFCARGPNYHDTTSYFDSWGQGTLVTVSS

SEQ ID NO: 13812 - protein, 98 aa, Homo sapiens
QVQLEQSGAEVKKPGSSVKISCKASGGTFNAYAIGWLRQAPGQGLEWMGGINPMFGIVNYAQKFQGRLAITADNFPSTAYMELSSLRSDDTAVYYCAR

SEQ ID NO: 13813 - protein, 122 aa, Homo sapiens
QVQLEQSGAEVKKPGSSVKISCKASGGTFNAYAIGWLRQAPGQGLEWMGGINPMFGIVNYAQKFQGRLAITADNFPSTAYMELSSLRSDDTAVYYCARGPNYHDTTTYFDPWGQGTLVTVSS

SEQ ID NO: 13814 - protein, 98 aa, Homo sapiens
QVQLEQSGAEVKKPGSSVKVSCKAAGGKFNSYAISWLRQAPGQGLEWMGGINPMFKIVDYAPKFQGRLTITADALPSTAYMELSSLRSEDTAVYYCAR

SEQ ID NO: 13815 - protein, 122 aa, Homo sapiens
QVQLEQSGAEVKKPGSSVKVSCKAAGGKFNSYAISWLRQAPGQGLEWMGGINPMFKIVDYAPKFQGRLTITADALPSTAYMELSSLRSEDTAVYYCARGPNYHDIVTYFDPWGQGTLVIVSS

SEQ ID NO: 13816 - protein, 98 aa, Homo sapiens
QVQLEQSGAEVKKPGSSVKVSCKASGGKFNSYAISWVRQAPGQGLEWMGGINPMFGIVDYAQKFQGRITITADALPSTAYMELRSLTSDDTAVYYCAR

SEQ ID NO: 13817 - protein, 122 aa, Homo sapiens
QVQLEQSGAEVKKPGSSVKVSCKASGGKFNSYAISWVRQAPGQGLEWMGGINPMFGIVDYAQKFQGRITITADALPSTAYMELRSLTSDDTAVYYCARGPNYHDTTTYLDPWGQGTLVTVSS

SEQ ID NO: 13818 - protein, 98 aa, Homo sapiens
QVQLEQSGAEVKKPGSSVKVSCKASGGKFNSYAISWVRQAPGQGPEWMGGINPMFRIVDYAPKFKGRLTITAESLPSTAYMELSSLKLEDTAVYYCVR

SEQ ID NO: 13819 - protein, 122 aa, Homo sapiens
QVQLEQSGAEVKKPGSSVKVSCKASGGKFNSYAISWVRQAPGQGPEWMGGINPMFRIVDYAPKFKGRLTITAESLPSTAYMELSSLKLEDTAVYYCVRGPNYHDTTTYFDPWGQGTLVTVSS

SEQ ID NO: 13820 - protein, 98 aa, Homo sapiens
QVQLEQSGAEVKKPGSSVKVSCKASGGSIFRNYAISWVRQAPGQGLEWMGGILAVFGVPTYAQKFQGRVTITADDSTSTAYMELSNLRSEDTAVYYCA

SEQ ID NO: 13821 - protein, 121 aa, Homo sapiens
QVQLEQSGAEVKKPGSSVKVSCKASGGSIFRNYAISWVRQAPGQGLEWMGGILAVFGVPTYAQKFQGRVTITADDSTSTAYMELSNLRSEDTAVYYCARGPHYYSDYLDVWGQGTTVTVSS

SEQ ID NO: 13822 - protein, 98 aa, Homo sapiens
QVQLEQSGAEVKKPGSSVKVSCKASGGTFNAYAISWLRQAPGQGLEWMGGINPMFGIVKYAEKFQGRLTITADNFPSTAYMQLSSLRSDDAAVYYCAR

SEQ ID NO: 13823 - protein, 122 aa, Homo sapiens
QVQLEQSGAEVKKPGSSVKVSCKASGGTFNAYAISWLRQAPGQGLEWMGGINPMFGIVKYAEKFQGRLTITADNFPSTAYMQLSSLRSDDAAVYYCARGPNYHDTTSYFDPWGQGTLVTVSS

SEQ ID NO: 13824 - protein, 97 aa, Homo sapiens
QVQLEQSGAEVKKPGSSVKVSCKASGGTFNAYSIAWVRQAPGQGLEWVGGINPMFRLVNYAQKFQGRVTLTADTFPSTAYMELTNLRSDDTAVYYCA

SEQ ID NO: 13825 - protein, 122 aa, Homo sapiens
QVQLEQSGAEVKKPGSSVKVSCKASGGTFNAYSIAWVRQAPGQGLEWVGGINPMFRLVNYAQKFQGRVTLTADTFPSTAYMELTNLRSDDTAVYYCARGPNYHDTTGYFDPWGQGTLVIVSS

SEQ ID NO: 13826 - protein, 97 aa, Homo sapiens
QVQLEQSGAEVKKPGSSVKVSCKASGGTFNSFAISWVRQAPGQGLEWMGGINPLFGLPKYAQKFQGRVTITADRSTTTAFLELSSLTSEETAVYYCT

SEQ ID NO: 13827 - protein, 125 aa, Homo sapiens
QVQLEQSGAEVKKPGSSVKVSCKASGGTFNSFAISWVRQAPGQGLEWMGGINPLFGLPKYAQKFQGRVTITADRSTTTAFLELSSLTSEETAVYYCTAAGSFSPRYYHFYYMDVWGKGTTVTVSS

SEQ ID NO: 13828 - protein, 97 aa, Homo sapiens
QVQLEQSGAEVKKPGSSVKVSCKTSGGTFNSYAISWVRQAPGQGLEWIGGINPMFGIVNYAQKFQGRVTISADAFPSTAYMELRSLRSEDTAVYYCA

SEQ ID NO: 13829 - protein, 122 aa, Homo sapiens
QVQLEQSGAEVKKPGSSVKVSCKTSGGTFNSYAISWVRQAPGQGLEWIGGINPMFGIVNYAQKFQGRVTISADAFPSTAYMELRSLRSEDTAVYYCARGPNYHDTTTYFDPWGQGTLVTVSS

SEQ ID NO: 13830 - protein, 98 aa, Homo sapiens
QVQLEQSGAEVKKPGSSVKVSCKTSGGTFNSYAISWVRQAPGQGLEWIGGINPMFGIVNYAQKFQGRVTITADSYPSTAYMELRSLRSDDTAVYYCAR

SEQ ID NO: 13831 - protein, 122 aa, Homo sapiens
QVQLEQSGAEVKKPGSSVKVSCKTSGGTFNSYAISWVRQAPGQGLEWIGGINPMFGIVNYAQKFQGRVTITADSYPSTAYMELRSLRSDDTAVYYCARGPNYHDTTTYFDPWGQGTRVTVSS

SEQ ID NO: 13832 - protein, 97 aa, Homo sapiens
QVQLEQSGAEVKKPGSSVKVSCRASGGSFNNNAISWLRQAPGQGLEWMGGINPMFRIVNYAPKFQGRLTITADALPSTAYMELSSLTSEDTAVYYCA

SEQ ID NO: 13833 - protein, 122 aa, Homo sapiens
QVQLEQSGAEVKKPGSSVKVSCRASGGSFNNNAISWLRQAPGQGLEWMGGINPMFRIVNYAPKFQGRLTITADALPSTAYMELSSLTSEDTAVYYCARGPNYHDTTTYFDPWGQGTLVTVSS

SEQ ID NO: 13834 - protein, 98 aa, Homo sapiens
QVQLEQSGAEVKKPGSSVRLSCRLTGVHFNKYAINWVRQAPGQGLEWVGGIMPIFRLANYGQKFQGRVTITADESATTSYLELNSLTSDDTAIYYCAR

SEQ ID NO: 13835 - protein, 123 aa, Homo sapiens
QVQLEQSGAEVKKPGSSVRLSCRLTGVHFNKYAINWVRQAPGQGLEWVGGIMPIFRLANYGQKFQGRVTITADESATTSYLELNSLTSDDTAIYYCARDGSGNYNKDWYFDVWGRGSLITVSS

SEQ ID NO: 13836 - protein, 97 aa, Homo sapiens
QVQLEQSGAEVKKPGSSVRVSCKASGGAFNNNAISWVRQAPGQGLEWMGGINPMFRLVDYAQKFQGRLTITADALPSTAYMELSSLTSEDTAVYYCA

SEQ ID NO: 13837 - protein, 122 aa, Homo sapiens
QVQLEQSGAEVKKPGSSVRVSCKASGGAFNNNAISWVRQAPGQGLEWMGGINPMFRLVDYAQKFQGRLTITADALPSTAYMELSSLTSEDTAVYYCARGPNYHDTTTYFVSWGQGTLVTVSS

SEQ ID NO: 13838 - protein, 98 aa, Homo sapiens
QVQLEQSGAEVKKPGSSVRVSCKVAGGKFDAYAISWLRQAPGQGLEWMGGINPMFGIVNYAPKFQGRLTITADKFPSTAYMQLSSLRSDDTAVYYCAR

SEQ ID NO: 13839 - protein, 122 aa, Homo sapiens
QVQLEQSGAEVKKPGSSVRVSCKVAGGKFDAYAISWLRQAPGQGLEWMGGINPMFGIVNYAPKFQGRLTITADKFPSTAYMQLSSLRSDDTAVYYCARGPNYHDTNTYFDPWGQGTLVTVSS

SEQ ID NO: 13840 - protein, 98 aa, Homo sapiens
QVQLEQSGAEVKRPGSSVKVSCKASGASFNSNAISWVRQAPGHGLEWMGGINPMFRITNYAQRFQGRITISADELPSTAYLDLSSLSSDDTAIYYCAR

SEQ ID NO: 13841 - protein, 121 aa, Homo sapiens
QVQLEQSGAEVKRPGSSVKVSCKASGASFNSNAISWVRQAPGHGLEWMGGINPMFRITNYAQRFQGRITISADELPSTAYLDLSSLSSDDTAIYYCARETGYNFGSPFEVWGQGTLVIVSS

SEQ ID NO: 13842 - protein, 98 aa, Homo sapiens
QVQLEQSGAEVRKPGSSVKVSCKASGGPFSSYAISWVRQAPGQGLEWMGGIIPMFRITNYAQKFQGRLTITADDLPSTAYMELSSLRSEDTAVYYCAR

SEQ ID NO: 13843 - protein, 121 aa, Homo sapiens
QVQLEQSGAEVRKPGSSVKVSCKASGGPFSSYAISWVRQAPGQGLEWMGGIIPMFRITNYAQKFQGRLTITADDLPSTAYMELSSLRSEDTAVYYCARETGYHFGSPFDLWGQGSLVSVSS

SEQ ID NO: 13844 - protein, 97 aa, Homo sapiens
QVQLEQSGAQVKRPGSSVKVSCKVSGGIFRSNAISWVRQAPGQGLEWMGGILAIFGTTKYAQKFQGRVTISADESTSTVYMEVSSLRSDDTAIYYCA

SEQ ID NO: 13845 - protein, 121 aa, Homo sapiens
QVQLEQSGAQVKRPGSSVKVSCKVSGGIFRSNAISWVRQAPGQGLEWMGGILAIFGTTKYAQKFQGRVTISADESTSTVYMEVSSLRSDDTAIYYCAKTRYYHLEGAFDNWGQGTEVIVSS

SEQ ID NO: 13846 - protein, 98 aa, Homo sapiens
QVQLEQSGTEVKKPGSSVKVSCKASGGTFNNNAIIWVRQAPGQGLEWMGGINPMFRIVNYAQKFQGRVTITADTFPSTAYMELSSLTSDDTAVYYCAR

SEQ ID NO: 13847 - protein, 122 aa, Homo sapiens
QVQLEQSGTEVKKPGSSVKVSCKASGGTFNNNAIIWVRQAPGQGLEWMGGINPMFRIVNYAQKFQGRVTITADTFPSTAYMELSSLTSDDTAVYYCARGPNYHDTNTYLDPWGQGTLVTVSS

SEQ ID NO: 13848 - protein, 96 aa, Homo sapiens
QVQLEQWGAGLLKPSETLSLTCGVSGGSLSAFYWSWIRQPPGKGLEWIGDISVSGGTHYNPSLKSRVTTSTDSYKNHFSLELRSLTAADTAIYYCA

SEQ ID NO: 13849 - protein, 122 aa, Homo sapiens
QVQLEQWGAGLLKPSETLSLTCGVSGGSLSAFYWSWIRQPPGKGLEWIGDISVSGGTHYNPSLKSRVTTSTDSYKNHFSLELRSLTAADTAIYYCARQGGDYVEGEFYFDYWGQGALVTVSS

SEQ ID NO: 13850 - protein, 98 aa, Homo sapiens
QVQLGESGGGVAQPGTSLRLSCEVSGFSFSTFAIHWVRQAPGKGLQWVAVVWSDGTTKYYADSVKGRFTISRDNSKNTVSLEMNSLRAEDTAVYYCAR

SEQ ID NO: 13851 - protein, 120 aa, Homo sapiens
QVQLGESGGGVAQPGTSLRLSCEVSGFSFSTFAIHWVRQAPGKGLQWVAVVWSDGTTKYYADSVKGRFTISRDNSKNTVSLEMNSLRAEDTAVYYCAREVLYGGYYFDYWGQGTLVTVSS

SEQ ID NO: 13852 - protein, 98 aa, Homo sapiens
QVQLGQSGVEAKKPGASVKVSCEGSGYIFSHYAITWVRQAPGQGLEWMGWISAYNGNRNYAQKFQGRLTLTTDTSANTAYMELRTLRSDDTAVYYCAR

SEQ ID NO: 13853 - protein, 124 aa, Homo sapiens
QVQLGQSGVEAKKPGASVKVSCEGSGYIFSHYAITWVRQAPGQGLEWMGWISAYNGNRNYAQKFQGRLTLTTDTSANTAYMELRTLRSDDTAVYYCARGASFAYFQDNSPLDSWGQGTLVTVSS

SEQ ID NO: 13854 - protein, 98 aa, Homo sapiens
QVQLHQWGAGLLKPSETLSLSCDVDGGSFSGYYWSWIRQPPGEGLEWVGEFTHRGRTNYNPSLESRVTISVDASKNQFSLRLNSVTAADTAMYYCARG

SEQ ID NO: 13855 - protein, 124 aa, Homo sapiens
QVQLHQWGAGLLKPSETLSLSCDVDGGSFSGYYWSWIRQPPGEGLEWVGEFTHRGRTNYNPSLESRVTISVDASKNQFSLRLNSVTAADTAMYYCARGFGQLSLDGYKYYFDYWGQGTLVTVSS

SEQ ID NO: 13856 - protein, 97 aa, Homo sapiens
QVQLIQSGAEVKKPGSSVKVSCKASGGTLINYAIYWVRQAPGQGLEWMGGIVPVFGSSHYAQKFQGRVTITADESTSTAYMELSTLRSEDTAVYYCA

SEQ ID NO: 13857 - protein, 120 aa, Homo sapiens
QVQLIQSGAEVKKPGSSVKVSCKASGGTLINYAIYWVRQAPGQGLEWMGGIVPVFGSSHYAQKFQGRVTITADESTSTAYMELSTLRSEDTAVYYCARAENSVYDSPEYWGQGTLVTVSS

SEQ ID NO: 13858 - protein, 97 aa, Homo sapiens
QVQLIQSGAEVRKPGASVKVSCKVSGYSLTELILHWVRQAPGQGLEYMGSFDPEDGEALFAQRFQGRVTMTEDTSTDTIYMELSALTSEDTAVYFCA

SEQ ID NO: 13859 - protein, 119 aa, Homo sapiens
QVQLIQSGAEVRKPGASVKVSCKVSGYSLTELILHWVRQAPGQGLEYMGSFDPEDGEALFAQRFQGRVTMTEDTSTDTIYMELSALTSEDTAVYFCAVPGVAVAYSFDVWGQGTVVTVS

SEQ ID NO: 13860 - protein, 97 aa, Homo sapiens
QVQLKQWGAGLLKPSETLSLTCGVSGGSLRNYDWSWVRQSPEKGLEWIGEIDDRRATNYNPSLQSRLTMSVDTSKNQYSLKLTSVTATDTGVYYCAR

SEQ ID NO: 13861 - protein, 127 aa, Homo sapiens
QVQLKQWGAGLLKPSETLSLTCGVSGGSLRNYDWSWVRQSPEKGLEWIGEIDDRRATNYNPSLQSRLTMSVDTSKNQYSLKLTSVTATDTGVYYCARLGPTTRQGPTRRAPSAMDVWGQGTTVTVSS

SEQ ID NO: 13862 - protein, 97 aa, Homo sapiens
QVQLKQWGAGLLKPSETLSLTCGVYGGSLRNYDWSWIRQTPEKGLEWIGEIDDRRNINYSPSLKSRLTMSVDTSKNQYSLRLTSVTAADTGVYYCAR

SEQ ID NO: 13863 - protein, 127 aa, Homo sapiens
QVQLKQWGAGLLKPSETLSLTCGVYGGSLRNYDWSWIRQTPEKGLEWIGEIDDRRNINYSPSLKSRLTMSVDTSKNQYSLRLTSVTAADTGVYYCARLGPTTRQGPTRRAPSAMDVWGQGTTVTVSS

SEQ ID NO: 13864 - protein, 97 aa, Homo sapiens
QVQLLESGGGVVQPGRSLRLSCAASGFRFNIYVMHWVRQAPGKGLEWVAVISRYGTNKYFADSVKGRFTISRDDSKSTLFLQMNSLRTEDTAVYYCA

SEQ ID NO: 13865 - protein, 122 aa, Homo sapiens
QVQLLESGGGVVQPGRSLRLSCAASGFRFNIYVMHWVRQAPGKGLEWVAVISRYGTNKYFADSVKGRFTISRDDSKSTLFLQMNSLRTEDTAVYYCARGDGDFHEGNYFDLWGPGALVTVSS

SEQ ID NO: 13866 - protein, 96 aa, Homo sapiens
QVQLLESGGGVVQPGRSLRLSCAASGFTFSNYGMNWVRQAPGKGLEWVAGIWYDGRNKYYADSVKGRFTISRDSSMLFLQMNSLRAEDTALYYCAR

SEQ ID NO: 13867 - protein, 119 aa, Homo sapiens
QVQLLESGGGVVQPGRSLRLSCAASGFTFSNYGMNWVRQAPGKGLEWVAGIWYDGRNKYYADSVKGRFTISRDSSMLFLQMNSLRAEDTALYYCARESGIVGDKVFDYWGQGTLVTVSS

SEQ ID NO: 13868 - protein, 96 aa, Homo sapiens
QVQLLESGGGVVQPGRSLRLSCAPSGFTFSHFGMTWVRQAPGKGLEWVAGIWYDGRNANYADSVKGRFTISRDSSMVFLQMNSLRVEDTALYYCAR

SEQ ID NO: 13869 - protein, 119 aa, Homo sapiens
QVQLLESGGGVVQPGRSLRLSCAPSGFTFSHFGMTWVRQAPGKGLEWVAGIWYDGRNANYADSVKGRFTISRDSSMVFLQMNSLRVEDTALYYCARESGIVGDKVFDYWGQGTLVTVSS

SEQ ID NO: 13870 - protein, 96 aa, Homo sapiens
QVQLLESGPGLVKLSETLSLTCSVSGGSMNNQYWSWIRQSPGKGLEWIGYIHYSGNSNYNPSLNSRVTMSVDTSKKVFFLRLTSVTAADTAVYFCA

SEQ ID NO: 13871 - protein, 131 aa, Homo sapiens
QVQLLESGPGLVKLSETLSLTCSVSGGSMNNQYWSWIRQSPGKGLEWIGYIHYSGNSNYNPSLNSRVTMSVDTSKKVFFLRLTSVTAADTAVYFCAGGWREQLGGMGGSHVGHYYYGMDVWGQGTTVTVSS

SEQ ID NO: 13872 - protein, 98 aa, Homo sapiens
QVQLLQSGAEVKKPGSSVKVSCKASGGTFSSYAINWVRQAPGHGLEWMGGINPMFGTVSYAQEFQGRVTITADAFPSTAYMELSSLRPEDTAVYYCAR

SEQ ID NO: 13873 - protein, 123 aa, Homo sapiens
QVQLLQSGAEVKKPGSSVKVSCKASGGTFSSYAINWVRQAPGHGLEWMGGINPMFGTVSYAQEFQGRVTITADAFPSTAYMELSSLRPEDTAVYYCARSDRYYYDSGSGVTDWGQGTLVTVSS

SEQ ID NO: 13874 - protein, 97 aa, Homo sapiens
QVQLLQSGAEVKRPGSSVKVSCKVSGGLFRNNAISWVRRAPGQGLEWVGGIIALFGVSNYAQKFQGRVTVSADESTNTVYMELKSLRSEDTAVYYCA

SEQ ID NO: 13875 - protein, 122 aa, Homo sapiens
QVQLLQSGAEVKRPGSSVKVSCKVSGGLFRNNAISWVRRAPGQGLEWVGGIIALFGVSNYAQKFQGRVTVSADESTNTVYMELKSLRSEDTAVYYCAKGSGYHFSTGALDQWGQGTLVTVSS

SEQ ID NO: 13876 - protein, 98 aa, Homo sapiens
QVQLMQSGAEVKKPGASVKISCRPSGYTFGRHAIHWVRQAPGHRPEWMGWINGANDHTKYAQKFQVRVTISRNTSASTAYMELRSLRPEDTAIYYCAR

SEQ ID NO: 13877 - protein, 124 aa, Homo sapiens
QVQLMQSGAEVKKPGASVKISCRPSGYTFGRHAIHWVRQAPGHRPEWMGWINGANDHTKYAQKFQVRVTISRNTSASTAYMELRSLRPEDTAIYYCARDLWGYGSGDPDALDMWGQGTMVTVSS

SEQ ID NO: 13878 - protein, 99 aa, Homo sapiens
QVQLMQSGAEVKKPGASVKVSCKASGYTFTSYDINWVRQATGQGLEWMGWLNPNSGNTGYVQKLQGRVTMTRNTSTSTAYMELSSLRSEDTAVYYCARG

SEQ ID NO: 13879 - protein, 119 aa, Homo sapiens
QVQLMQSGAEVKKPGASVKVSCKASGYTFTSYDINWVRQATGQGLEWMGWLNPNSGNTGYVQKLQGRVTMTRNTSTSTAYMELSSLRSEDTAVYYCARGGPLDYGLDVWGQGTTVTVSS

SEQ ID NO: 13880 - protein, 97 aa, Homo sapiens
QVQLMQSGAEVKKPGSSVKVSCKTSGGIFRSYAISWVRQAPGQGLEWMGGILAIFGTPNYAQNFQGRVTISTDESASTVYMELSTLRSQDTAVYFCA

SEQ ID NO: 13881 - protein, 120 aa, Homo sapiens
QVQLMQSGAEVKKPGSSVKVSCKTSGGIFRSYAISWVRQAPGQGLEWMGGILAIFGTPNYAQNFQGRVTISTDESASTVYMELSTLRSQDTAVYFCASGSTYYPSYFDSWGQGTLVTVSS

SEQ ID NO: 13882 - protein, 98 aa, Homo sapiens
QVQLMQSGGEVKKPGASVKVSCKTSGYTFNNYGITWVRQAPGQGLEWMGWISPYNGNTNFAQKFQGRVSMTTDTSTNTVYMELRSLRSDDTAVYYCAR

SEQ ID NO: 13883 - protein, 122 aa, Homo sapiens
QVQLMQSGGEVKKPGASVKVSCKTSGYTFNNYGITWVRQAPGQGLEWMGWISPYNGNTNFAQKFQGRVSMTTDTSTNTVYMELRSLRSDDTAVYYCARDRRHILSGLDPDYWGQGTLVIVSS

SEQ ID NO: 13884 - protein, 97 aa, Homo sapiens
QVQLQASGPGLVKPSETLSLTCTVSGDSITNYYWSWIRQPAGKGLEWIGRIFTSGSTNYNPSLKSRVTMSVDTSKNQFSLKLSSVTAADTAVYYCAR

SEQ ID NO: 13885 - protein, 121 aa, Homo sapiens
QVQLQASGPGLVKPSETLSLTCTVSGDSITNYYWSWIRQPAGKGLEWIGRIFTSGSTNYNPSLKSRVTMSVDTSKNQFSLKLSSVTAADTAVYYCARDLGIVGANPTFDYWGQGTLVTVSS

SEQ ID NO: 13886 - protein, 97 aa, Homo sapiens
QVQLQDSGPGLVKPSETLSLTCAVSGASISSYYWSWLRQPPGKGLEWIGLIYPSGSTSYNSSLNSRVTVSVDTSKNQFSLKLRSLTAADTAIYYCAR

SEQ ID NO: 13887 - protein, 120 aa, Homo sapiens
QVQLQDSGPGLVKPSETLSLTCAVSGASISSYYWSWLRQPPGKGLEWIGLIYPSGSTSYNSSLNSRVTVSVDTSKNQFSLKLRSLTAADTAIYYCARLNCIIASCPLDYWGQGTLVTVSS

SEQ ID NO: 13888 - protein, 99 aa, Homo sapiens
QVQLQESGPGLLKPSETLSLTCTVSGGSVSSGNYYWSWIRQPPGKGLEWLGYIYYGGSTDYNPSLKSRVTISVDTSKNQFSLKLSSVTAADTAVYYCAR

SEQ ID NO: 13889 - protein, 124 aa, Homo sapiens
QVQLQESGPGLLKPSETLSLTCTVSGGSVSSGNYYWSWIRQPPGKGLEWLGYIYYGGSTDYNPSLKSRVTISVDTSKNQFSLKLSSVTAADTAVYYCARSSPNDILTGYYLDYWGQGTLVTVSS

SEQ ID NO: 13890 - protein, 97 aa, Homo sapiens
QVQLQESGPGLMKPSETLSLTCTVSADSIHDYFWAWIRQPAGKALEWIGRINTSGNTNYNPSLKSRVTMSVDTSKNEVSLKLSSVTAADTAVYYCAR

SEQ ID NO: 13891 - protein, 126 aa, Homo sapiens
QVQLQESGPGLMKPSETLSLTCTVSADSIHDYFWAWIRQPAGKALEWIGRINTSGNTNYNPSLKSRVTMSVDTSKNEVSLKLSSVTAADTAVYYCARDPDFSLVRGPWDYYNVDVWGQGTTVTVSS

SEQ ID NO: 13892 - protein, 97 aa, Homo sapiens
QVQLQESGPGLVEPSETLSLTCTVSGGSIGSYYWHWIRQPAGKGLEWIGRVYSNGRIKYNPSLESRVTVSVDASKNQFFLRLNSVTATDTAVYYCAR

SEQ ID NO: 13893 - protein, 125 aa, Homo sapiens
QVQLQESGPGLVEPSETLSLTCTVSGGSIGSYYWHWIRQPAGKGLEWIGRVYSNGRIKYNPSLESRVTVSVDASKNQFFLRLNSVTATDTAVYYCAREGSSCDEAKCAEGSFDCWGQGTLVTVSS

SEQ ID NO: 13894 - protein, 99 aa, Homo sapiens
QVQLQESGPGLVEPSQTLSLTCTVSGDSVSSRDYSWTWIRQSPGKGLECIGYIFYNGRTYTNPSLKSRLAISLDTSRNQFSLMLGSVTAADTAVYYCAR

SEQ ID NO: 13895 - protein, 123 aa, Homo sapiens
QVQLQESGPGLVEPSQTLSLTCTVSGDSVSSRDYSWTWIRQSPGKGLECIGYIFYNGRTYTNPSLKSRLAISLDTSRNQFSLMLGSVTAADTAVYYCAREPSGYSRANAFDVWGRGTMVTVSS

SEQ ID NO: 13896 - protein, 97 aa, Homo sapiens
QVQLQESGPGLVKPSEPLSLTCNVSGDSISNYYWAWIRQSPGKGLEWIAYISSRGRTNYNPSLKRRVTISIDTSKNQFSLRLLSVTAADTALYYCAR

SEQ ID NO: 13897 - protein, 121 aa, Homo sapiens
QVQLQESGPGLVKPSEPLSLTCNVSGDSISNYYWAWIRQSPGKGLEWIAYISSRGRTNYNPSLKRRVTISIDTSKNQFSLRLLSVTAADTALYYCARDDTGISGLNAFDIWGRGTMVTVSS

SEQ ID NO: 13898 - protein, 102 aa, Homo sapiens
QVQLQESGPGLVKPSETLALTCTVSGVSISSYYWSWIRQSPGKGLECVGYISYSGRTNSGRTNYNPSLKSRVAISVDMSKNQFFLNLRSVTAADTAVYYCAR

SEQ ID NO: 13899 - protein, 126 aa, Homo sapiens
QVQLQESGPGLVKPSETLALTCTVSGVSISSYYWSWIRQSPGKGLECVGYISYSGRTNSGRTNYNPSLKSRVAISVDMSKNQFFLNLRSVTAADTAVYYCARDTTAALGKNAFDIWGQGTMVTVSS

SEQ ID NO: 13900 - protein, 98 aa, Homo sapiens
QVQLQESGPGLVKPSETLALTCTVSGYSISSGYYWAWIRQPPGKGLEWIGNIYHSGSAYYNPSLKSRVTISVDTSKNQFSLKLSSVTAADTAMFYCAR

SEQ ID NO: 13901 - protein, 125 aa, Homo sapiens
QVQLQESGPGLVKPSETLALTCTVSGYSISSGYYWAWIRQPPGKGLEWIGNIYHSGSAYYNPSLKSRVTISVDTSKNQFSLKLSSVTAADTAMFYCARGGDKPGISVAGNYFDYWGQGTLVTVSS

SEQ ID NO: 13902 - protein, 97 aa, Homo sapiens
QVQLQESGPGLVKPSETLSLICTVSDGSISSHYWNWIRQPPGKGLEWIGNIYYTGTTDYNPSLRSRVTISVDTSKNQFSLKLTSVTAADTAVYYCVR

SEQ ID NO: 13903 - protein, 115 aa, Homo sapiens
QVQLQESGPGLVKPSETLSLICTVSDGSISSHYWNWIRQPPGKGLEWIGNIYYTGTTDYNPSLRSRVTISVDTSKNQFSLKLTSVTAADTAVYYCVRDWGLGRNWGQGTLVTVSS

SEQ ID NO: 13904 - protein, 99 aa, Homo sapiens
QVQLQESGPGLVKPSETLSLICTVSGGSISSFYWSWIRQPAGKGLEWIGRIYVSGSTKYNPSLKSRVTMSIDTSKSKNHFSLKLSSVTAADAAVYYCAR

SEQ ID NO: 13905 - protein, 123 aa, Homo sapiens
QVQLQESGPGLVKPSETLSLICTVSGGSISSFYWSWIRQPAGKGLEWIGRIYVSGSTKYNPSLKSRVTMSIDTSKSKNHFSLKLSSVTAADAAVYYCARGSGSGWLGDYFDYWGQGILVTVSS

SEQ ID NO: 13906 - protein, 97 aa, Homo sapiens
QVQLQESGPGLVKPSETLSLRCTVSGASIRSHYWSWIRQTPGKGPEWIGTVYYTGSTSYNPSLKSRVTTTVDTSKNEFSLNLTSVTAADTAVYYCAR

SEQ ID NO: 13907 - protein, 120 aa, Homo sapiens
QVQLQESGPGLVKPSETLSLRCTVSGASIRSHYWSWIRQTPGKGPEWIGTVYYTGSTSYNPSLKSRVTTTVDTSKNEFSLNLTSVTAADTAVYYCARVTSDSYIWVFDFWGQGSLVTVSS

SEQ ID NO: 13908 - protein, 98 aa, Homo sapiens
QVQLQESGPGLVKPSETLSLSCAVSGNSIDRAYYWGWIRQPPGKGLEWIGSMFHSGRGYFNPSLQSRVTISLDTSKKQLSLKVTSVTAADTAVYYCAR

SEQ ID NO: 13909 - protein, 126 aa, Homo sapiens
QVQLQESGPGLVKPSETLSLSCAVSGNSIDRAYYWGWIRQPPGKGLEWIGSMFHSGRGYFNPSLQSRVTISLDTSKKQLSLKVTSVTAADTAVYYCARWYYDILTSYQRHDPFDIWGQGTMVSVSS

SEQ ID NO: 13910 - protein, 97 aa, Homo sapiens
QVQLQESGPGLVKPSETLSLSCTVSGGSISNYYWGWIRQPPGKGLEWIGNIYYSGSTNYNPFLKSRVTISVDTSKNQFSLKLSSVTAADTAVYYCAR

SEQ ID NO: 13911 - protein, 126 aa, Homo sapiens
QVQLQESGPGLVKPSETLSLSCTVSGGSISNYYWGWIRQPPGKGLEWIGNIYYSGSTNYNPFLKSRVTISVDTSKNQFSLKLSSVTAADTAVYYCARHLRMIMFGGVIAQDAFDIWGQGTMVTVSS

SEQ ID NO: 13912 - protein, 97 aa, Homo sapiens
QVQLQESGPGLVKPSETLSLSCTVSGGSITSYYWSWIRQSAGKGLEWIGRIYTSGSTNYNPSLKSRVIMSVDTSKNQLSLNLSSVTAADTAVYFCAR

SEQ ID NO: 13913 - protein, 126 aa, Homo sapiens
QVQLQESGPGLVKPSETLSLSCTVSGGSITSYYWSWIRQSAGKGLEWIGRIYTSGSTNYNPSLKSRVIMSVDTSKNQLSLNLSSVTAADTAVYFCARDPDFSLVRGPWDYYGVDVWGQGTTVTVSS

SEQ ID NO: 13914 - protein, 97 aa, Homo sapiens
QVQLQESGPGLVKPSETLSLTCAVSDYSISSGYYLGWIRQPPGKGLEWIGSIYHSGSTYYNPSLKSRVTISVDTSKNQFSLKLSSVTAADTAVYYCA

SEQ ID NO: 13915 - protein, 129 aa, Homo sapiens
QVQLQESGPGLVKPSETLSLTCAVSDYSISSGYYLGWIRQPPGKGLEWIGSIYHSGSTYYNPSLKSRVTISVDTSKNQFSLKLSSVTAADTAVYYCAKHGGATMIVVVAEWAAQYFQHWGQGTLVTVSS

SEQ ID NO: 13916 - protein, 98 aa, Homo sapiens
QVQLQESGPGLVKPSETLSLTCAVSGDSISRGYYWGWIRQPPGKGLEWIGTIYHSGSTFYNPSLKSRVTTSIDTSKNQFSLKLSSVTAADTAVYYCAR

SEQ ID NO: 13917 - protein, 119 aa, Homo sapiens
QVQLQESGPGLVKPSETLSLTCAVSGDSISRGYYWGWIRQPPGKGLEWIGTIYHSGSTFYNPSLKSRVTTSIDTSKNQFSLKLSSVTAADTAVYYCARVIGLYGYFDYWGLGTLVTVSS

SEQ ID NO: 13918 - protein, 97 aa, Homo sapiens
QVQLQESGPGLVKPSETLSLTCAVSGYSISGGYCWGWIRQSPGKGLEWIGTIYHSGITYYNPSLKSRVTLSVDTSKSQFSLRLSSVTAADTAVYYCA

SEQ ID NO: 13919 - protein, 122 aa, Homo sapiens
QVQLQESGPGLVKPSETLSLTCAVSGYSISGGYCWGWIRQSPGKGLEWIGTIYHSGITYYNPSLKSRVTLSVDTSKSQFSLRLSSVTAADTAVYYCARAGEIIVVPGYMDVWGKGTTVTVSS

SEQ ID NO: 13920 - protein, 97 aa, Homo sapiens
QVQLQESGPGLVKPSETLSLTCAVSGYSISSGYYWGWIRQPPGKGLEWIGSIYHSGSTYYNPSLKSRVTISVDTSKNQFSLKLSSVTAADTAVYYCA

SEQ ID NO: 13921 - protein, 98 aa, Homo sapiens
QVQLQESGPGLVKPSETLSLTCAVSGYSISSGYYWGWIRQPPGKGLEWIGSIYHSGSTYYNPSLKSRVTISVDTSKNQFSLKLSSVTAADTAVYYCAR

SEQ ID NO: 13922 - protein, 122 aa, Homo sapiens
QVQLQESGPGLVKPSETLSLTCAVSGYSISSGYYWGWIRQPPGKGLEWIGSIYHSGSTYYNPSLKSRVTISVDTSKNQFSLKLSSVTAADTAVYYCARGDGGITPILYFDYWGQGTLVTVSS

SEQ ID NO: 13923 - protein, 115 aa, Homo sapiens
QVQLQESGPGLVKPSETLSLTCAVSGYSISSGYYWGWIRQPPGKGLEWIGSIYHSGSTYYNPSLKSRVTISVDTSKNQFSLKLSSVTAADTAVYYCARGIDFDYWGQGTLVTVSS

SEQ ID NO: 13924 - protein, 120 aa, Homo sapiens
QVQLQESGPGLVKPSETLSLTCAVSGYSISSGYYWGWIRQPPGKGLEWIGSIYHSGSTYYNPSLKSRVTISVDTSKNQFSLKLSSVTAADTAVYYCARGTLDFDWFLGYWGQGTLVTVSS

SEQ ID NO: 13925 - protein, 119 aa, Homo sapiens
QVQLQESGPGLVKPSETLSLTCAVSGYSISSGYYWGWIRQPPGKGLEWIGSIYHSGSTYYNPSLKSRVTISVDTSKNQFSLKLSSVTAADTAVYYCARHPLWLTGTDYWGQGTLVTVSS

SEQ ID NO: 13926 - protein, 119 aa, Homo sapiens
QVQLQESGPGLVKPSETLSLTCAVSGYSISSGYYWGWIRQPPGKGLEWIGSIYHSGSTYYNPSLKSRVTISVDTSKNQFSLKLSSVTAADTAVYYCARLAGTVGAFDIWGQGTMVTVSS

SEQ ID NO: 13927 - protein, 118 aa, Homo sapiens
QVQLQESGPGLVKPSETLSLTCAVSGYSISSGYYWGWIRQPPGKGLEWIGSIYHSGSTYYNPSLKSRVTISVDTSKNQFSLKLSSVTAADTAVYYCARLGSSSWYDYWGQGTLVTVSS

SEQ ID NO: 13928 - protein, 122 aa, Homo sapiens
QVQLQESGPGLVKPSETLSLTCAVSGYSISSGYYWGWIRQPPGKGLEWIGSIYHSGSTYYNPSLKSRVTISVDTSKNQFSLKLSSVTAADTAVYYCARRRVVRGVRDAFDIWGQGTMVTVSS

SEQ ID NO: 13929 - protein, 123 aa, Homo sapiens
QVQLQESGPGLVKPSETLSLTCAVSGYSISSGYYWGWIRQPPGKGLEWIGSIYHSGSTYYNPSLKSRVTISVDTSKNQFSLKLSSVTAADTAVYYCARVVPDDILTGYHLDYWGQGTLVTVSS

SEQ ID NO: 13930 - protein, 128 aa, Homo sapiens
QVQLQESGPGLVKPSETLSLTCAVSGYSISSGYYWGWIRQPPGKGLEWIGSIYHSGSTYYNPSLKSRVTISVDTSKNQFSLKLSSVTAADTAVYYCASPPLRRLAYCGGDCYSYFDYWGQGTLVTVSS

SEQ ID NO: 13931 - protein, 97 aa, Homo sapiens
QVQLQESGPGLVKPSETLSLTCAVSGYSISSVYYWGWIRQPPGKGLEWIGSIYHSGSTYYNPSLKSRVTISVDTSKNQFSLKLSSVTAADTAVYYCA

SEQ ID NO: 13932 - protein, 122 aa, Homo sapiens
QVQLQESGPGLVKPSETLSLTCAVSGYSISSVYYWGWIRQPPGKGLEWIGSIYHSGSTYYNPSLKSRVTISVDTSKNQFSLKLSSVTAADTAVYYCARGVVVTAITHYFDYWGQGTLVTVSS

SEQ ID NO: 13933 - protein, 98 aa, Homo sapiens
QVQLQESGPGLVKPSETLSLTCAVSGYSVNSGYYLAWIRQPPGKELESIGIIYHGGITYYNPSLKSRVTISLDTSKSQFSLKLTSVTAADTAVYYCAR

SEQ ID NO: 13934 - protein, 124 aa, Homo sapiens
QVQLQESGPGLVKPSETLSLTCAVSGYSVNSGYYLAWIRQPPGKELESIGIIYHGGITYYNPSLKSRVTISLDTSKSQFSLKLTSVTAADTAVYYCARGVRGSYPDLTFYFDYWGQGMLVTVSS

SEQ ID NO: 13935 - protein, 98 aa, Homo sapiens
QVQLQESGPGLVKPSETLSLTCGVSAYSISNGYKWGWIRQPPGKGLQYIGSIDHSGHTYNNPSLESRITLSMDMSKNQFSLRLSFVTAADSAVYFCAR

SEQ ID NO: 13936 - protein, 119 aa, Homo sapiens
QVQLQESGPGLVKPSETLSLTCGVSAYSISNGYKWGWIRQPPGKGLQYIGSIDHSGHTYNNPSLESRITLSMDMSKNQFSLRLSFVTAADSAVYFCARQHPTNGYIDYWGQGTLVTVSS

SEQ ID NO: 13937 - protein, 97 aa, Homo sapiens
QVQLQESGPGLVKPSETLSLTCIVSGGSIRSYYWSWIRQPPGKGLEWIGYIYTSGSTNYNPSLKSRVTISVDTSKNQFSLNLTSVTAADTAVYYCAR

SEQ ID NO: 13938 - protein, 129 aa, Homo sapiens
QVQLQESGPGLVKPSETLSLTCIVSGGSIRSYYWSWIRQPPGKGLEWIGYIYTSGSTNYNPSLKSRVTISVDTSKNQFSLNLTSVTAADTAVYYCARLGTAAAGSRLRYSYHYYYMDVWGKGTTVTVSS

SEQ ID NO: 13939 - protein, 97 aa, Homo sapiens
QVQLQESGPGLVKPSETLSLTCNVSGDSITSHYWSWIRQPPGKGLECIGYIYYSGRTYYNPSLKSRVTISVDTSKNQFSLSLRSVTAADTAIYYCAR

SEQ ID NO: 13940 - protein, 121 aa, Homo sapiens
QVQLQESGPGLVKPSETLSLTCNVSGDSITSHYWSWIRQPPGKGLECIGYIYYSGRTYYNPSLKSRVTISVDTSKNQFSLSLRSVTAADTAIYYCARDNTGSSEKNAFDIWGQGTLVAVSS

SEQ ID NO: 13941 - protein, 9 aa, Homo sapiens
QGADTSGTG

SEQ ID NO: 13942 - protein, 11 aa, Homo sapiens
QGDILRDYYAS

SEQ ID NO: 13943 - protein, 11 aa, Homo sapiens
QGDNLRKYYAS

SEQ ID NO: 13944 - protein, 11 aa, Homo sapiens
QGDRLRRNYAS

SEQ ID NO: 13945 - protein, 11 aa, Homo sapiens
QGDSLRRYYAS

SEQ ID NO: 13946 - protein, 11 aa, Homo sapiens
QGDSLRSFYAS

SEQ ID NO: 13947 - protein, 11 aa, Homo sapiens
QGDSLRSSYAS

SEQ ID NO: 13948 - protein, 11 aa, Homo sapiens
QGDSLRSYYAN

SEQ ID NO: 13949 - protein, 11 aa, Homo sapiens
QGDSLRSYYAS

SEQ ID NO: 13950 - protein, 11 aa, Homo sapiens
QGDSLRTFYAS

SEQ ID NO: 13951 - protein, 11 aa, Homo sapiens
QGDSLRTYYAN

SEQ ID NO: 13952 - protein, 14 aa, Homo sapiens
QGGDYVEGEFYFDY

SEQ ID NO: 13953 - protein, 12 aa, Homo sapiens
QGGVVGATPLDY

SEQ ID NO: 13954 - protein, 15 aa, Homo sapiens
QGISETTYSYYYMDV

SEQ ID NO: 13955 - protein, 15 aa, Homo sapiens
QGPSGTTYYHYYMDV

SEQ ID NO: 13956 - protein, 98 aa, Homo sapiens; identical to SEQ ID NO: 11956

SEQ ID NO: 13957 - protein, 123 aa, Homo sapiens; identical to SEQ ID NO: 11957

SEQ ID NO: 13958 - protein, 98 aa, Homo sapiens; identical to SEQ ID NO: 11958

SEQ ID NO: 13959 - protein, 127 aa, Homo sapiens; identical to SEQ ID NO: 11959

SEQ ID NO: 13960 - protein, 98 aa, Homo sapiens; identical to SEQ ID NO: 11960

SEQ ID NO: 13961 - protein, 130 aa, Homo sapiens; identical to SEQ ID NO: 11961

SEQ ID NO: 13962 - protein, 98 aa, Homo sapiens; identical to SEQ ID NO: 11962

SEQ ID NO: 13963 - protein, 130 aa, Homo sapiens; identical to SEQ ID NO: 11963

SEQ ID NO: 13964 - protein, 98 aa, Homo sapiens; identical to SEQ ID NO: 11964

SEQ ID NO: 13965 - protein, 121 aa, Homo sapiens; identical to SEQ ID NO: 11965

SEQ ID NO: 13966 - protein, 14 aa, Homo sapiens
QGRIGTSRYGDFDS

SEQ ID NO: 13967 - protein, 15 aa, Homo sapiens
QGTPGTTYYHYYMDV

SEQ ID NO: 13968 - protein, 15 aa, Homo sapiens
QGTPGTTYYNYYMDV

SEQ ID NO: 13969 - protein, 15 aa, Homo sapiens
QGTSGTNYVYYYMDV

SEQ ID NO: 13970 - protein, 13 aa, Homo sapiens
QGVGTINYVYFDY

SEQ ID NO: 13971 - protein, 15 aa, Homo sapiens
QGVSETTYYNYYMDL

SEQ ID NO: 13972 - protein, 15 aa, Homo sapiens
QGVSGTNYYYYYMDI

SEQ ID NO: 13973 - protein, 15 aa, Homo sapiens
QGVSGTTYYHYYMDV

SEQ ID NO: 13974 - protein, 15 aa, Homo sapiens
QGVSGTTYYNYYMDL

SEQ ID NO: 13975 - protein, 15 aa, Homo sapiens
QGVSGTTYYNYYMDV

SEQ ID NO: 13976 - protein, 15 aa, Homo sapiens
QGVSGTTYYYYYMDI

SEQ ID NO: 13977 - protein, 15 aa, Homo sapiens
QGVSGTTYYYYYMDV

SEQ ID NO: 13978 - protein, 11 aa, Homo sapiens
QGYGDYVVFDY

SEQ ID NO: 13979 - protein, 11 aa, Homo sapiens
QHFSTSLRIFT

SEQ ID NO: 13980 - protein, 9 aa, Homo sapiens
QHLDTYPLT

SEQ ID NO: 13981 - protein, 9 aa, Homo sapiens
QHLKSYPLS

SEQ ID NO: 13982 - protein, 14 aa, Homo sapiens
QHLWESSGYRCFDN

SEQ ID NO: 13983 - protein, 5 aa, Homo sapiens
QHNYT

SEQ ID NO: 13984 - protein, 10 aa, Homo sapiens
QHPTNGYIDY

SEQ ID NO: 13985 - protein, 10 aa, Homo sapiens
QHRSGWPPIT

SEQ ID NO: 13986 - protein, 9 aa, Homo sapiens
QHYADSVWT

SEQ ID NO: 13987 - protein, 10 aa, Homo sapiens
QHYDDVPPWT

SEQ ID NO: 13988 - protein, 9 aa, Homo sapiens
QHYDGYPRT

SEQ ID NO: 13989 - protein, 9 aa, Homo sapiens
QHYDNLPLT

SEQ ID NO: 13990 - protein, 9 aa, Homo sapiens
QHYDSSRGT

SEQ ID NO: 13991 - protein, 9 aa, Homo sapiens
QHYDSSSLT

SEQ ID NO: 13992 - protein, 9 aa, Homo sapiens
QHYDSYSGT

SEQ ID NO: 13993 - protein, 9 aa, Homo sapiens
QHYDTYSGT

SEQ ID NO: 13994 - protein, 10 aa, Homo sapiens
QHYGGSPRIT

SEQ ID NO: 13995 - protein, 9 aa, Homo sapiens
QHYGPSPLT

SEQ ID NO: 13996 - protein, 10 aa, Homo sapiens
QHYGRSPPYT

SEQ ID NO: 13997 - protein, 10 aa, Homo sapiens
QHYGRSPRWT

SEQ ID NO: 13998 - protein, 9 aa, Homo sapiens
QHYGSSFLT

SEQ ID NO: 13999 - protein, 9 aa, Homo sapiens
QHYGSSLRA

SEQ ID NO: 14000 - protein, 9 aa, Homo sapiens
QHYGSSLWT

SEQ ID NO: 14001 - protein, 10 aa, Homo sapiens
QHYGSSPGYT

SEQ ID NO: 14002 - protein, 10 aa, Homo sapiens
QHYGSSPMYT

SEQ ID NO: 14003 - protein, 10 aa, Homo sapiens
QHYGSSPRWT

SEQ ID NO: 14004 - protein, 9 aa, Homo sapiens
QHYGSSSLT

SEQ ID NO: 14005 - protein, 10 aa, Homo sapiens
QHYGTSLLST

SEQ ID NO: 14006 - protein, 9 aa, Homo sapiens
QHYGTSPRT

SEQ ID NO: 14007 - protein, 9 aa, Homo sapiens
QHYHSFPFI

SEQ ID NO: 14008 - protein, 9 aa, Homo sapiens
QHYNDYPYT

SEQ ID NO: 14009 - protein, 9 aa, Homo sapiens
QHYNFYRFT

SEQ ID NO: 14010 - protein, 9 aa, Homo sapiens
QHYNFYSWT

SEQ ID NO: 14011 - protein, 9 aa, Homo sapiens
QHYNGYCPH

SEQ ID NO: 14012 - protein, 9 aa, Homo sapiens
QHYNNWLYT

SEQ ID NO: 14013 - protein, 9 aa, Homo sapiens
QHYNNWPHT

SEQ ID NO: 14014 - protein, 10 aa, Homo sapiens
QHYNPNSFYT

SEQ ID NO: 14015 - protein, 9 aa, Homo sapiens
QHYNSYSAT

SEQ ID NO: 14016 - protein, 9 aa, Homo sapiens
QHYNSYSGT

SEQ ID NO: 14017 - protein, 9 aa, Homo sapiens
QHYNSYSRT

SEQ ID NO: 14018 - protein, 11 aa, Homo sapiens
QHYNTYFPEGT

SEQ ID NO: 14019 - protein, 9 aa, Homo sapiens
QHYNTYPYT

SEQ ID NO: 14020 - protein, 9 aa, Homo sapiens
QHYNTYSCT

SEQ ID NO: 14021 - protein, 9 aa, Homo sapiens
QHYNTYSGT

SEQ ID NO: 14022 - protein, 9 aa, Homo sapiens
QHYNTYSWT

SEQ ID NO: 14023 - protein, 9 aa, Homo sapiens
QHYNTYSYT

SEQ ID NO: 14024 - protein, 9 aa, Homo sapiens
QHYNTYWCA

SEQ ID NO: 14025 - protein, 6 aa, Homo sapiens
QHYRDT

SEQ ID NO: 14026 - protein, 5 aa, Homo sapiens
QHYRT

SEQ ID NO: 14027 - protein, 10 aa, Homo sapiens
QHYSNWPPWT

SEQ ID NO: 14028 - protein, 9 aa, Homo sapiens
QHYSVYSRT

SEQ ID NO: 14029 - protein, 10 aa, Homo sapiens
QHYTNWPPWT

SEQ ID NO: 14030 - protein, 9 aa, Homo sapiens
QHYVGSPLT

SEQ ID NO: 14031 - protein, 9 aa, Homo sapiens
QHYYDFPYT

SEQ ID NO: 14032 - protein, 9 aa, Homo sapiens
QHYYITPYT

SEQ ID NO: 14033 - protein, 9 aa, Homo sapiens
QHYYSFSNT

SEQ ID NO: 14034 - protein, 98 aa, Homo sapiens; identical to SEQ ID NO: 12034

SEQ ID NO: 14035 - protein, 123 aa, Homo sapiens; identical to SEQ ID NO: 12035

SEQ ID NO: 14036 - protein, 17 aa, Homo sapiens
QIIPFFGTTNTAQRFRG

SEQ ID NO: 14037 - protein, 17 aa, Homo sapiens
QIIPIFGTANSAHKFRG

SEQ ID NO: 14038 - protein, 17 aa, Homo sapiens
QIKSDGSNIKYADAVKG

SEQ ID NO: 14039 - protein, 17 aa, Homo sapiens
QIMPIFGTPKYAQKFQG

SEQ ID NO: 14040 - protein, 17 aa, Homo sapiens
QIMPIFGTPKYAQRFQG

SEQ ID NO: 14041 - protein, 19 aa, Homo sapiens
QIPQLHSCGGDCYAAPFDY

SEQ ID NO: 14042 - protein, 98 aa, Homo sapiens; identical to SEQ ID NO: 12042

SEQ ID NO: 14043 - protein, 118 aa, Homo sapiens; identical to SEQ ID NO: 12043

SEQ ID NO: 14044 - protein, 98 aa, Homo sapiens; identical to SEQ ID NO: 12044

SEQ ID NO: 14045 - protein, 120 aa, Homo sapiens; identical to SEQ ID NO: 12045

SEQ ID NO: 14046 - protein, 98 aa, Homo sapiens; identical to SEQ ID NO: 12046

SEQ ID NO: 14047 - protein, 124 aa, Homo sapiens; identical to SEQ ID NO: 12047

SEQ ID NO: 14048 - protein, 17 aa, Homo sapiens
QISFSDNEIYYRDSVKG

SEQ ID NO: 14049 - protein, 99 aa, Homo sapiens; identical to SEQ ID NO: 12049

SEQ ID NO: 14050 - protein, 125 aa, Homo sapiens; identical to SEQ ID NO: 12050

SEQ ID NO: 14051 - protein, 98 aa, Homo sapiens; identical to SEQ ID NO: 12051

SEQ ID NO: 14052 - protein, 126 aa, Homo sapiens; identical to SEQ ID NO: 12052

SEQ ID NO: 14053 - protein, 99 aa, Homo sapiens; identical to SEQ ID NO: 12053

SEQ ID NO: 14054 - protein, 126 aa, Homo sapiens; identical to SEQ ID NO: 12054

SEQ ID NO: 14055 - protein, 99 aa, Homo sapiens; identical to SEQ ID NO: 12055

SEQ ID NO: 14056 - protein, 129 aa, Homo sapiens; identical to SEQ ID NO: 12056

SEQ ID NO: 14057 - protein, 100 aa, Homo sapiens; identical to SEQ ID NO: 12057

SEQ ID NO: 14058 - protein, 123 aa, Homo sapiens; identical to SEQ ID NO: 12058

SEQ ID NO: 14059 - protein, 99 aa, Homo sapiens; identical to SEQ ID NO: 12059

SEQ ID NO: 14060 - protein, 128 aa, Homo sapiens; identical to SEQ ID NO: 12060

SEQ ID NO: 14061 - protein, 98 aa, Homo sapiens; identical to SEQ ID NO: 12061

SEQ ID NO: 14062 - protein, 121 aa, Homo sapiens; identical to SEQ ID NO: 12062

SEQ ID NO: 14063 - protein, 99 aa, Homo sapiens; identical to SEQ ID NO: 12063

SEQ ID NO: 14064 - protein, 117 aa, Homo sapiens; identical to SEQ ID NO: 12064

SEQ ID NO: 14065 - protein, 100 aa, Homo sapiens; identical to SEQ ID NO: 12065

SEQ ID NO: 14066 - protein, 123 aa, Homo sapiens; identical to SEQ ID NO: 12066

SEQ ID NO: 14067 - protein, 126 aa, Homo sapiens; identical to SEQ ID NO: 12067

SEQ ID NO: 14068 - protein, 128 aa, Homo sapiens; identical to SEQ ID NO: 12068

SEQ ID NO: 14069 - protein, 128 aa, Homo sapiens; identical to SEQ ID NO: 12069

SEQ ID NO: 14070 - protein, 99 aa, Homo sapiens; identical to SEQ ID NO: 12070

SEQ ID NO: 14071 - protein, 124 aa, Homo sapiens; identical to SEQ ID NO: 12071

SEQ ID NO: 14072 - protein, 124 aa, Homo sapiens; identical to SEQ ID NO: 12072

SEQ ID NO: 14073 - protein, 99 aa, Homo sapiens; identical to SEQ ID NO: 12073

SEQ ID NO: 14074 - protein, 128 aa, Homo sapiens; identical to SEQ ID NO: 12074

SEQ ID NO: 14075 - protein, 99 aa, Homo sapiens; identical to SEQ ID NO: 12075

SEQ ID NO: 14076 - protein, 121 aa, Homo sapiens; identical to SEQ ID NO: 12076

SEQ ID NO: 14077 - protein, 99 aa, Homo sapiens; identical to SEQ ID NO: 12077

SEQ ID NO: 14078 - protein, 127 aa, Homo sapiens; identical to SEQ ID NO: 12078

SEQ ID NO: 14079 - protein, 99 aa, Homo sapiens; identical to SEQ ID NO: 12079

SEQ ID NO: 14080 - protein, 126 aa, Homo sapiens; identical to SEQ ID NO: 12080

SEQ ID NO: 14081 - protein, 100 aa, Homo sapiens; identical to SEQ ID NO: 12081

SEQ ID NO: 14082 - protein, 130 aa, Homo sapiens; identical to SEQ ID NO: 12082

SEQ ID NO: 14083 - protein, 100 aa, Homo sapiens; identical to SEQ ID NO: 12083

SEQ ID NO: 14084 - protein, 123 aa, Homo sapiens; identical to SEQ ID NO: 12084

SEQ ID NO: 14085 - protein, 99 aa, Homo sapiens; identical to SEQ ID NO: 12085

SEQ ID NO: 14086 - protein, 126 aa, Homo sapiens; identical to SEQ ID NO: 12086

SEQ ID NO: 14087 - protein, 99 aa, Homo sapiens; identical to SEQ ID NO: 12087

SEQ ID NO: 14088 - protein, 125 aa, Homo sapiens; identical to SEQ ID NO: 12088

SEQ ID NO: 14089 - protein, 99 aa, Homo sapiens; identical to SEQ ID NO: 12089

SEQ ID NO: 14090 - protein, 129 aa, Homo sapiens; identical to SEQ ID NO: 12090

SEQ ID NO: 14091 - protein, 15 aa, Homo sapiens
QKLLWFGELSPPTEY

SEQ ID NO: 14092 - protein, 9 aa, Homo sapiens
QKYDGAPWT

SEQ ID NO: 14093 - protein, 9 aa, Homo sapiens
QKYDSAPLT

SEQ ID NO: 14094 - protein, 9 aa, Homo sapiens
QKYDSAPRT

SEQ ID NO: 14095 - protein, 9 aa, Homo sapiens
QKYNSAPLT

SEQ ID NO: 14096 - protein, 11 aa, Homo sapiens
QKYNSAPPGIT

SEQ ID NO: 14097 - protein, 10 aa, Homo sapiens
QKYNSAPPLT

SEQ ID NO: 14098 - protein, 10 aa, Homo sapiens
QKYNSAPPWT

SEQ ID NO: 14099 - protein, 9 aa, Homo sapiens
QKYNSAPQT

SEQ ID NO: 14100 - protein, 9 aa, Homo sapiens
QKYNSASGT

SEQ ID NO: 14101 - protein, 9 aa, Homo sapiens
QKYNSDSGT

SEQ ID NO: 14102 - protein, 12 aa, Homo sapiens
QKYSSTWYSIDY

SEQ ID NO: 14103 - protein, 99 aa, Homo sapiens; identical to SEQ ID NO: 12103

SEQ ID NO: 14104 - protein, 121 aa, Homo sapiens; identical to SEQ ID NO: 12104

SEQ ID NO: 14105 - protein, 8 aa, Homo sapiens
QLGGGDCL

SEQ ID NO: 14106 - protein, 99 aa, Homo sapiens; identical to SEQ ID NO: 12106

SEQ ID NO: 14107 - protein, 117 aa, Homo sapiens; identical to SEQ ID NO: 12107

SEQ ID NO: 14108 - protein, 98 aa, Homo sapiens; identical to SEQ ID NO: 12108

SEQ ID NO: 14109 - protein, 127 aa, Homo sapiens; identical to SEQ ID NO: 12109

SEQ ID NO: 14110 - protein, 99 aa, Homo sapiens; identical to SEQ ID NO: 12110

SEQ ID NO: 14111 - protein, 126 aa, Homo sapiens; identical to SEQ ID NO: 12111

SEQ ID NO: 14112 - protein, 94 aa, Homo sapiens; identical to SEQ ID NO: 12112

SEQ ID NO: 14113 - protein, 119 aa, Homo sapiens; identical to SEQ ID NO: 12113

SEQ ID NO: 14114 - protein, 98 aa, Homo sapiens; identical to SEQ ID NO: 12114

SEQ ID NO: 14115 - protein, 120 aa, Homo sapiens; identical to SEQ ID NO: 12115

SEQ ID NO: 14116 - protein, 97 aa, Homo sapiens; identical to SEQ ID NO: 12116

SEQ ID NO: 14117 - protein, 124 aa, Homo sapiens; identical to SEQ ID NO: 12117

SEQ ID NO: 14118 - protein, 99 aa, Homo sapiens; identical to SEQ ID NO: 12118

SEQ ID NO: 14119 - protein, 128 aa, Homo sapiens; identical to SEQ ID NO: 12119

SEQ ID NO: 14120 - protein, 99 aa, Homo sapiens; identical to SEQ ID NO: 12120

SEQ ID NO: 14121 - protein, 122 aa, Homo sapiens; identical to SEQ ID NO: 12121

SEQ ID NO: 14122 - protein, 98 aa, Homo sapiens; identical to SEQ ID NO: 12122

SEQ ID NO: 14123 - protein, 121 aa, Homo sapiens; identical to SEQ ID NO: 12123

SEQ ID NO: 14124 - protein, 99 aa, Homo sapiens; identical to SEQ ID NO: 12124

SEQ ID NO: 14125 - protein, 125 aa, Homo sapiens; identical to SEQ ID NO: 12125

SEQ ID NO: 14126 - protein, 98 aa, Homo sapiens; identical to SEQ ID NO: 12126

SEQ ID NO: 14127 - protein, 123 aa, Homo sapiens; identical to SEQ ID NO: 12127

SEQ ID NO: 14128 - protein, 99 aa, Homo sapiens; identical to SEQ ID NO: 12128

SEQ ID NO: 14129 - protein, 126 aa, Homo sapiens; identical to SEQ ID NO: 12129

SEQ ID NO: 14130 - protein, 98 aa, Homo sapiens; identical to SEQ ID NO: 12130

SEQ ID NO: 14131 - protein, 122 aa, Homo sapiens; identical to SEQ ID NO: 12131

SEQ ID NO: 14132 - protein, 99 aa, Homo sapiens; identical to SEQ ID NO: 12132

SEQ ID NO: 14133 - protein, 123 aa, Homo sapiens; identical to SEQ ID NO: 12133

SEQ ID NO: 14134 - protein, 99 aa, Homo sapiens; identical to SEQ ID NO: 12134

SEQ ID NO: 14135 - protein, 123 aa, Homo sapiens; identical to SEQ ID NO: 12135

SEQ ID NO: 14136 - protein, 96 aa, Homo sapiens; identical to SEQ ID NO: 12136

SEQ ID NO: 14137 - protein, 131 aa, Homo sapiens; identical to SEQ ID NO: 12137

SEQ ID NO: 14138 - protein, 99 aa, Homo sapiens; identical to SEQ ID NO: 12138

SEQ ID NO: 14139 - protein, 125 aa, Homo sapiens; identical to SEQ ID NO: 12139

SEQ ID NO: 14140 - protein, 98 aa, Homo sapiens; identical to SEQ ID NO: 12140

SEQ ID NO: 14141 - protein, 124 aa, Homo sapiens; identical to SEQ ID NO: 12141

SEQ ID NO: 14142 - protein, 99 aa, Homo sapiens; identical to SEQ ID NO: 12142

SEQ ID NO: 14143 - protein, 117 aa, Homo sapiens; identical to SEQ ID NO: 12143

SEQ ID NO: 14144 - protein, 99 aa, Homo sapiens; identical to SEQ ID NO: 12144

SEQ ID NO: 14145 - protein, 130 aa, Homo sapiens; identical to SEQ ID NO: 12145

SEQ ID NO: 14146 - protein, 99 aa, Homo sapiens; identical to SEQ ID NO: 12146

SEQ ID NO: 14147 - protein, 117 aa, Homo sapiens; identical to SEQ ID NO: 12147

SEQ ID NO: 14148 - protein, 99 aa, Homo sapiens; identical to SEQ ID NO: 12148

SEQ ID NO: 14149 - protein, 117 aa, Homo sapiens; identical to SEQ ID NO: 12149

SEQ ID NO: 14150 - protein, 99 aa, Homo sapiens; identical to SEQ ID NO: 12150

SEQ ID NO: 14151 - protein, 122 aa, Homo sapiens; identical to SEQ ID NO: 12151

SEQ ID NO: 14152 - protein, 99 aa, Homo sapiens; identical to SEQ ID NO: 12152

SEQ ID NO: 14153 - protein, 123 aa, Homo sapiens; identical to SEQ ID NO: 12153

SEQ ID NO: 14154 - protein, 99 aa, Homo sapiens; identical to SEQ ID NO: 12154

SEQ ID NO: 14155 - protein, 125 aa, Homo sapiens; identical to SEQ ID NO: 12155

SEQ ID NO: 14156 - protein, 99 aa, Homo sapiens; identical to SEQ ID NO: 12156

SEQ ID NO: 14157 - protein, 123 aa, Homo sapiens; identical to SEQ ID NO: 12157

SEQ ID NO: 14158 - protein, 99 aa, Homo sapiens; identical to SEQ ID NO: 12158

SEQ ID NO: 14159 - protein, 125 aa, Homo sapiens; identical to SEQ ID NO: 12159

SEQ ID NO: 14160 - protein, 98 aa, Homo sapiens; identical to SEQ ID NO: 12160

SEQ ID NO: 14161 - protein, 120 aa, Homo sapiens; identical to SEQ ID NO: 12161

SEQ ID NO: 14162 - protein, 99 aa, Homo sapiens; identical to SEQ ID NO: 12162

SEQ ID NO: 14163 - protein, 123 aa, Homo sapiens; identical to SEQ ID NO: 12163

SEQ ID NO: 14164 - protein, 99 aa, Homo sapiens; identical to SEQ ID NO: 12164

SEQ ID NO: 14165 - protein, 125 aa, Homo sapiens; identical to SEQ ID NO: 12165

SEQ ID NO: 14166 - protein, 98 aa, Homo sapiens; identical to SEQ ID NO: 12166

SEQ ID NO: 14167 - protein, 99 aa, Homo sapiens; identical to SEQ ID NO: 12167

SEQ ID NO: 14168 - protein, 124 aa, Homo sapiens; identical to SEQ ID NO: 12168

SEQ ID NO: 14169 - protein, 124 aa, Homo sapiens; identical to SEQ ID NO: 12169

SEQ ID NO: 14170 - protein, 99 aa, Homo sapiens; identical to SEQ ID NO: 12170

SEQ ID NO: 14171 - protein, 124 aa, Homo sapiens; identical to SEQ ID NO: 12171

SEQ ID NO: 14172 - protein, 124 aa, Homo sapiens; identical to SEQ ID NO: 12172

SEQ ID NO: 14173 - protein, 122 aa, Homo sapiens; identical to SEQ ID NO: 12173

SEQ ID NO: 14174 - protein, 124 aa, Homo sapiens; identical to SEQ ID NO: 12174

SEQ ID NO: 14175 - protein, 128 aa, Homo sapiens; identical to SEQ ID NO: 12175

SEQ ID NO: 14176 - protein, 127 aa, Homo sapiens; identical to SEQ ID NO: 12176

SEQ ID NO: 14177 - protein, 121 aa, Homo sapiens; identical to SEQ ID NO: 12177

SEQ ID NO: 14178 - protein, 125 aa, Homo sapiens; identical to SEQ ID NO: 12178

SEQ ID NO: 14179 - protein, 124 aa, Homo sapiens; identical to SEQ ID NO: 12179

SEQ ID NO: 14180 - protein, 124 aa, Homo sapiens; identical to SEQ ID NO: 12180

SEQ ID NO: 14181 - protein, 124 aa, Homo sapiens; identical to SEQ ID NO: 12181

SEQ ID NO: 14182 - protein, 121 aa, Homo sapiens; identical to SEQ ID NO: 12182

SEQ ID NO: 14183 - protein, 99 aa, Homo sapiens; identical to SEQ ID NO: 12183

SEQ ID NO: 14184 - protein, 121 aa, Homo sapiens; identical to SEQ ID NO: 12184

SEQ ID NO: 14185 - protein, 132 aa, Homo sapiens; identical to SEQ ID NO: 12185

SEQ ID NO: 14186 - protein, 99 aa, Homo sapiens; identical to SEQ ID NO: 12186

SEQ ID NO: 14187 - protein, 127 aa, Homo sapiens; identical to SEQ ID NO: 12187

SEQ ID NO: 14188 - protein, 97 aa, Homo sapiens; identical to SEQ ID NO: 12188

SEQ ID NO: 14189 - protein, 126 aa, Homo sapiens; identical to SEQ ID NO: 12189

SEQ ID NO: 14190 - protein, 99 aa, Homo sapiens; identical to SEQ ID NO: 12190

SEQ ID NO: 14191 - protein, 122 aa, Homo sapiens; identical to SEQ ID NO: 12191

SEQ ID NO: 14192 - protein, 99 aa, Homo sapiens; identical to SEQ ID NO: 12192

SEQ ID NO: 14193 - protein, 126 aa, Homo sapiens; identical to SEQ ID NO: 12193

SEQ ID NO: 14194 - protein, 99 aa, Homo sapiens; identical to SEQ ID NO: 12194

SEQ ID NO: 14195 - protein, 126 aa, Homo sapiens; identical to SEQ ID NO: 12195

SEQ ID NO: 14196 - protein, 98 aa, Homo sapiens; identical to SEQ ID NO: 12196

SEQ ID NO: 14197 - protein, 125 aa, Homo sapiens; identical to SEQ ID NO: 12197

SEQ ID NO: 14198 - protein, 99 aa, Homo sapiens; identical to SEQ ID NO: 12198

SEQ ID NO: 14199 - protein, 129 aa, Homo sapiens; identical to SEQ ID NO: 12199

SEQ ID NO: 14200 - protein, 99 aa, Homo sapiens; identical to SEQ ID NO: 12200

SEQ ID NO: 14201 - protein, 118 aa, Homo sapiens; identical to SEQ ID NO: 12201

SEQ ID NO: 14202 - protein, 99 aa, Homo sapiens; identical to SEQ ID NO: 12202

SEQ ID NO: 14203 - protein, 124 aa, Homo sapiens; identical to SEQ ID NO: 12203

SEQ ID NO: 14204 - protein, 98 aa, Homo sapiens; identical to SEQ ID NO: 12204

SEQ ID NO: 14205 - protein, 125 aa, Homo sapiens; identical to SEQ ID NO: 12205

SEQ ID NO: 14206 - protein, 99 aa, Homo sapiens; identical to SEQ ID NO: 12206

SEQ ID NO: 14207 - protein, 121 aa, Homo sapiens; identical to SEQ ID NO: 12207

SEQ ID NO: 14208 - protein, 99 aa, Homo sapiens; identical to SEQ ID NO: 12208

SEQ ID NO: 14209 - protein, 117 aa, Homo sapiens; identical to SEQ ID NO: 12209

SEQ ID NO: 14210 - protein, 98 aa, Homo sapiens; identical to SEQ ID NO: 12210

SEQ ID NO: 14211 - protein, 117 aa, Homo sapiens; identical to SEQ ID NO: 12211

SEQ ID NO: 14212 - protein, 98 aa, Homo sapiens; identical to SEQ ID NO: 12212

SEQ ID NO: 14213 - protein, 122 aa, Homo sapiens; identical to SEQ ID NO: 12213

SEQ ID NO: 14214 - protein, 98 aa, Homo sapiens; identical to SEQ ID NO: 12214

SEQ ID NO: 14215 - protein, 127 aa, Homo sapiens; identical to SEQ ID NO: 12215

SEQ ID NO: 14216 - protein, 99 aa, Homo sapiens; identical to SEQ ID NO: 12216

SEQ ID NO: 14217 - protein, 123 aa, Homo sapiens; identical to SEQ ID NO: 12217

SEQ ID NO: 14218 - protein, 99 aa, Homo sapiens; identical to SEQ ID NO: 12218

SEQ ID NO: 14219 - protein, 114 aa, Homo sapiens; identical to SEQ ID NO: 12219

SEQ ID NO: 14220 - protein, 99 aa, Homo sapiens; identical to SEQ ID NO: 12220

SEQ ID NO: 14221 - protein, 120 aa, Homo sapiens; identical to SEQ ID NO: 12221

SEQ ID NO: 14222 - protein, 99 aa, Homo sapiens; identical to SEQ ID NO: 12222

SEQ ID NO: 14223 - protein, 120 aa, Homo sapiens; identical to SEQ ID NO: 12223

SEQ ID NO: 14224 - protein, 99 aa, Homo sapiens; identical to SEQ ID NO: 12224

SEQ ID NO: 14225 - protein, 128 aa, Homo sapiens; identical to SEQ ID NO: 12225

SEQ ID NO: 14226 - protein, 99 aa, Homo sapiens; identical to SEQ ID NO: 12226

SEQ ID NO: 14227 - protein, 128 aa, Homo sapiens; identical to SEQ ID NO: 12227

SEQ ID NO: 14228 - protein, 99 aa, Homo sapiens; identical to SEQ ID NO: 12228

SEQ ID NO: 14229 - protein, 123 aa, Homo sapiens; identical to SEQ ID NO: 12229

SEQ ID NO: 14230 - protein, 98 aa, Homo sapiens; identical to SEQ ID NO: 12230

SEQ ID NO: 14231 - protein, 128 aa, Homo sapiens; identical to SEQ ID NO: 12231

SEQ ID NO: 14232 - protein, 99 aa, Homo sapiens; identical to SEQ ID NO: 12232

SEQ ID NO: 14233 - protein, 123 aa, Homo sapiens; identical to SEQ ID NO: 12233

SEQ ID NO: 14234 - protein, 99 aa, Homo sapiens; identical to SEQ ID NO: 12234

SEQ ID NO: 14235 - protein, 127 aa, Homo sapiens; identical to SEQ ID NO: 12235

SEQ ID NO: 14236 - protein, 9 aa, Homo sapiens
QLRYNWFDT

SEQ ID NO: 14237 - protein, 95 aa, Homo sapiens; identical to SEQ ID NO: 12237

SEQ ID NO: 14238 - protein, 117 aa, Homo sapiens; identical to SEQ ID NO: 12238

SEQ ID NO: 14239 - protein, 96 aa, Homo sapiens; identical to SEQ ID NO: 12239

SEQ ID NO: 14240 - protein, 114 aa, Homo sapiens; identical to SEQ ID NO: 12240

SEQ ID NO: 14241 - protein, 96 aa, Homo sapiens; identical to SEQ ID NO: 12241

SEQ ID NO: 14242 - protein, 116 aa, Homo sapiens; identical to SEQ ID NO: 12242

SEQ ID NO: 14243 - protein, 95 aa, Homo sapiens; identical to SEQ ID NO: 12243

SEQ ID NO: 14244 - protein, 117 aa, Homo sapiens; identical to SEQ ID NO: 12244

SEQ ID NO: 14245 - protein, 96 aa, Homo sapiens; identical to SEQ ID NO: 12245

SEQ ID NO: 14246 - protein, 119 aa, Homo sapiens; identical to SEQ ID NO: 12246

SEQ ID NO: 14247 - protein, 99 aa, Homo sapiens; identical to SEQ ID NO: 12247

SEQ ID NO: 14248 - protein, 111 aa, Homo sapiens; identical to SEQ ID NO: 12248

SEQ ID NO: 14249 - protein, 97 aa, Homo sapiens; identical to SEQ ID NO: 12249

SEQ ID NO: 14250 - protein, 110 aa, Homo sapiens; identical to SEQ ID NO: 12250

SEQ ID NO: 14251 - protein, 98 aa, Homo sapiens; identical to SEQ ID NO: 12251

SEQ ID NO: 14252 - protein, 111 aa, Homo sapiens; identical to SEQ ID NO: 12252

SEQ ID NO: 14253 - protein, 97 aa, Homo sapiens; identical to SEQ ID NO: 12253

SEQ ID NO: 14254 - protein, 111 aa, Homo sapiens; identical to SEQ ID NO: 12254

SEQ ID NO: 14255 - protein, 99 aa, Homo sapiens; identical to SEQ ID NO: 12255

SEQ ID NO: 14256 - protein, 111 aa, Homo sapiens; identical to SEQ ID NO: 12256

SEQ ID NO: 14257 - protein, 99 aa, Homo sapiens; identical to SEQ ID NO: 12257

SEQ ID NO: 14258 - protein, 112 aa, Homo sapiens; identical to SEQ ID NO: 12258

SEQ ID NO: 14259 - protein, 98 aa, Homo sapiens; identical to SEQ ID NO: 12259

SEQ ID NO: 14260 - protein, 99 aa, Homo sapiens; identical to SEQ ID NO: 12260

SEQ ID NO: 14261 - protein, 111 aa, Homo sapiens; identical to SEQ ID NO: 12261

SEQ ID NO: 14262 - protein, 113 aa, Homo sapiens; identical to SEQ ID NO: 12262

SEQ ID NO: 14263 - protein, 98 aa, Homo sapiens; identical to SEQ ID NO: 12263

SEQ ID NO: 14264 - protein, 111 aa, Homo sapiens; identical to SEQ ID NO: 12264

SEQ ID NO: 14265 - protein, 99 aa, Homo sapiens; identical to SEQ ID NO: 12265

SEQ ID NO: 14266 - protein, 114 aa, Homo sapiens; identical to SEQ ID NO: 12266

SEQ ID NO: 14267 - protein, 98 aa, Homo sapiens; identical to SEQ ID NO: 12267

SEQ ID NO: 14268 - protein, 111 aa, Homo sapiens; identical to SEQ ID NO: 12268

SEQ ID NO: 14269 - protein, 99 aa, Homo sapiens; identical to SEQ ID NO: 12269

SEQ ID NO: 14270 - protein, 112 aa, Homo sapiens; identical to SEQ ID NO: 12270

SEQ ID NO: 14271 - protein, 96 aa, Homo sapiens; identical to SEQ ID NO: 12271

SEQ ID NO: 14272 - protein, 123 aa, Homo sapiens; identical to SEQ ID NO: 12272

SEQ ID NO: 14273 - protein, 99 aa, Homo sapiens; identical to SEQ ID NO: 12273

SEQ ID NO: 14274 - protein, 111 aa, Homo sapiens; identical to SEQ ID NO: 12274

SEQ ID NO: 14275 - protein, 99 aa, Homo sapiens; identical to SEQ ID NO: 12275

SEQ ID NO: 14276 - protein, 111 aa, Homo sapiens; identical to SEQ ID NO: 12276

SEQ ID NO: 14277 - protein, 10 aa, Homo sapiens
QLYGASPGRT

SEQ ID NO: 14278 - protein, 8 aa, Homo sapiens
QLYGGFLT

SEQ ID NO: 14279 - protein, 10 aa, Homo sapiens
QLYGRSPPYT

SEQ ID NO: 14280 - protein, 99 aa, Homo sapiens; identical to SEQ ID NO: 12280

SEQ ID NO: 14281 - protein, 126 aa, Homo sapiens; identical to SEQ ID NO: 12281

SEQ ID NO: 14282 - protein, 99 aa, Homo sapiens; identical to SEQ ID NO: 12282

SEQ ID NO: 14283 - protein, 125 aa, Homo sapiens; identical to SEQ ID NO: 12283

SEQ ID NO: 14284 - protein, 99 aa, Homo sapiens; identical to SEQ ID NO: 12284

SEQ ID NO: 14285 - protein, 130 aa, Homo sapiens; identical to SEQ ID NO: 12285

SEQ ID NO: 14286 - protein, 99 aa, Homo sapiens; identical to SEQ ID NO: 12286

SEQ ID NO: 14287 - protein, 127 aa, Homo sapiens; identical to SEQ ID NO: 12287

SEQ ID NO: 14288 - protein, 99 aa, Homo sapiens; identical to SEQ ID NO: 12288

SEQ ID NO: 14289 - protein, 117 aa, Homo sapiens; identical to SEQ ID NO: 12289

SEQ ID NO: 14290 - protein, 98 aa, Homo sapiens; identical to SEQ ID NO: 12290

SEQ ID NO: 14291 - protein, 126 aa, Homo sapiens; identical to SEQ ID NO: 12291

SEQ ID NO: 14292 - protein, 98 aa, Homo sapiens; identical to SEQ ID NO: 12292

SEQ ID NO: 14293 - protein, 131 aa, Homo sapiens; identical to SEQ ID NO: 12293

SEQ ID NO: 14294 - protein, 99 aa, Homo sapiens; identical to SEQ ID NO: 12294

SEQ ID NO: 14295 - protein, 117 aa, Homo sapiens; identical to SEQ ID NO: 12295

SEQ ID NO: 14296 - protein, 98 aa, Homo sapiens; identical to SEQ ID NO: 12296

SEQ ID NO: 14297 - protein, 117 aa, Homo sapiens; identical to SEQ ID NO: 12297

SEQ ID NO: 14298 - protein, 98 aa, Homo sapiens; identical to SEQ ID NO: 12298

SEQ ID NO: 14299 - protein, 128 aa, Homo sapiens; identical to SEQ ID NO: 12299

SEQ ID NO: 14300 - protein, 7 aa, Homo sapiens
QNDKRPS

SEQ ID NO: 14301 - protein, 7 aa, Homo sapiens
QNHAFDI

SEQ ID NO: 14302 - protein, 7 aa, Homo sapiens
QNNKRPS

SEQ ID NO: 14303 - protein, 9 aa, Homo sapiens
QNYKSVPLT

SEQ ID NO: 14304 - protein, 5 aa, Homo sapiens
QNYMS

SEQ ID NO: 14305 - protein, 11 aa, Homo sapiens
QNYNNAPRVFT

SEQ ID NO: 14306 - protein, 99 aa, Homo sapiens; identical to SEQ ID NO: 12306

SEQ ID NO: 14307 - protein, 126 aa, Homo sapiens; identical to SEQ ID NO: 12307

SEQ ID NO: 14308 - protein, 20 aa, Homo sapiens
QPRGTYCSLGVCDPYYYVDV

SEQ ID NO: 14309 - protein, 104 aa, Homo sapiens; identical to SEQ ID NO: 12309

SEQ ID NO: 14310 - protein, 116 aa, Homo sapiens; identical to SEQ ID NO: 12310

SEQ ID NO: 14311 - protein, 104 aa, Homo sapiens; identical to SEQ ID NO: 12311

SEQ ID NO: 14312 - protein, 116 aa, Homo sapiens; identical to SEQ ID NO: 12312

SEQ ID NO: 14313 - protein, 103 aa, Homo sapiens; identical to SEQ ID NO: 12313

SEQ ID NO: 14314 - protein, 116 aa, Homo sapiens; identical to SEQ ID NO: 12314

SEQ ID NO: 14315 - protein, 104 aa, Homo sapiens; identical to SEQ ID NO: 12315

SEQ ID NO: 14316 - protein, 116 aa, Homo sapiens; identical to SEQ ID NO: 12316

SEQ ID NO: 14317 - protein, 104 aa, Homo sapiens; identical to SEQ ID NO: 12317

SEQ ID NO: 14318 - protein, 116 aa, Homo sapiens; identical to SEQ ID NO: 12318

SEQ ID NO: 14319 - protein, 104 aa, Homo sapiens; identical to SEQ ID NO: 12319

SEQ ID NO: 14320 - protein, 116 aa, Homo sapiens; identical to SEQ ID NO: 12320

SEQ ID NO: 14321 - protein, 98 aa, Homo sapiens; identical to SEQ ID NO: 12321

SEQ ID NO: 14322 - protein, 110 aa, Homo sapiens; identical to SEQ ID NO: 12322

SEQ ID NO: 14323 - protein, 99 aa, Homo sapiens; identical to SEQ ID NO: 12323

SEQ ID NO: 14324 - protein, 111 aa, Homo sapiens; identical to SEQ ID NO: 12324

SEQ ID NO: 14325 - protein, 99 aa, Homo sapiens; identical to SEQ ID NO: 12325

SEQ ID NO: 14326 - protein, 111 aa, Homo sapiens; identical to SEQ ID NO: 12326

SEQ ID NO: 14327 - protein, 99 aa, Homo sapiens; identical to SEQ ID NO: 12327

SEQ ID NO: 14328 - protein, 111 aa, Homo sapiens; identical to SEQ ID NO: 12328

SEQ ID NO: 14329 - protein, 99 aa, Homo sapiens; identical to SEQ ID NO: 12329

SEQ ID NO: 14330 - protein, 112 aa, Homo sapiens; identical to SEQ ID NO: 12330

SEQ ID NO: 14331 - protein, 9 aa, Homo sapiens
QPYNYYFIT

SEQ ID NO: 14332 - protein, 9 aa, Homo sapiens
QQAGSFPWT

SEQ ID NO: 14333 - protein, 9 aa, Homo sapiens
QQANRFPLS

SEQ ID NO: 14334 - protein, 10 aa, Homo sapiens
QQANSFLPLT

SEQ ID NO: 14335 - protein, 9 aa, Homo sapiens
QQANSFPFT

SEQ ID NO: 14336 - protein, 9 aa, Homo sapiens
QQANSFPPA

SEQ ID NO: 14337 - protein, 9 aa, Homo sapiens
QQANSFPPT

SEQ ID NO: 14338 - protein, 9 aa, Homo sapiens
QQANSFPWT

SEQ ID NO: 14339 - protein, 9 aa, Homo sapiens
QQANSFPYT

SEQ ID NO: 14340 - protein, 9 aa, Homo sapiens
QQCAYSPRT

SEQ ID NO: 14341 - protein, 10 aa, Homo sapiens
QQCGNWPPIT

SEQ ID NO: 14342 - protein, 9 aa, Homo sapiens
QQCGTSPRT

SEQ ID NO: 14343 - protein, 9 aa, Homo sapiens
QQCHNLPGT

SEQ ID NO: 14344 - protein, 10 aa, Homo sapiens
QQCNNLPMCT

SEQ ID NO: 14345 - protein, 9 aa, Homo sapiens
QQDNNLPYT

SEQ ID NO: 14346 - protein, 9 aa, Homo sapiens
QQDYSIPWT

SEQ ID NO: 14347 - protein, 5 aa, Homo sapiens
QQFAA

SEQ ID NO: 14348 - protein, 9 aa, Homo sapiens
QQFGRSSWT

SEQ ID NO: 14349 - protein, 10 aa, Homo sapiens
QQFGSSRIYT

SEQ ID NO: 14350 - protein, 9 aa, Homo sapiens
QQFGTSPFT

SEQ ID NO: 14351 - protein, 9 aa, Homo sapiens
QQFNDSPVT

SEQ ID NO: 14352 - protein, 8 aa, Homo sapiens
QQFNNWPT

SEQ ID NO: 14353 - protein, 11 aa, Homo sapiens
QQFNSWPPRLT

SEQ ID NO: 14354 - protein, 11 aa, Homo sapiens
QQFNSYPRALS

SEQ ID NO: 14355 - protein, 9 aa, Homo sapiens
QQFNTYPYS

SEQ ID NO: 14356 - protein, 8 aa, Homo sapiens
QQFSRYLT

SEQ ID NO: 14357 - protein, 9 aa, Homo sapiens
QQFYATPPT

SEQ ID NO: 14358 - protein, 9 aa, Homo sapiens
QQFYDYPLT

SEQ ID NO: 14359 - protein, 9 aa, Homo sapiens
QQFYSDQFT

SEQ ID NO: 14360 - protein, 9 aa, Homo sapiens
QQFYSLPLT

SEQ ID NO: 14361 - protein, 9 aa, Homo sapiens
QQFYSPPWT

SEQ ID NO: 14362 - protein, 9 aa, Homo sapiens
QQFYSYPLT

SEQ ID NO: 14363 - protein, 9 aa, Homo sapiens
QQGDSYPYT

SEQ ID NO: 14364 - protein, 9 aa, Homo sapiens
QQHGNSPRT

SEQ ID NO: 14365 - protein, 9 aa, Homo sapiens
QQHGSSSLT

SEQ ID NO: 14366 - protein, 10 aa, Homo sapiens
QQHNNWPPIT

SEQ ID NO: 14367 - protein, 10 aa, Homo sapiens
QQHNNWPPWT

SEQ ID NO: 14368 - protein, 9 aa, Homo sapiens
QQHSIWPGT

SEQ ID NO: 14369 - protein, 9 aa, Homo sapiens
QQHSNWPST

SEQ ID NO: 14370 - protein, 9 aa, Homo sapiens
QQHYDIPYT

SEQ ID NO: 14371 - protein, 9 aa, Homo sapiens
QQHYSMPLT

SEQ ID NO: 14372 - protein, 9 aa, Homo sapiens
QQHYSTPGT

SEQ ID NO: 14373 - protein, 9 aa, Homo sapiens
QQHYTTPPT

SEQ ID NO: 14374 - protein, 14 aa, Homo sapiens
QQLAPAIGGDYFDY

SEQ ID NO: 14375 - protein, 9 aa, Homo sapiens
QQLDSYTYT

SEQ ID NO: 14376 - protein, 9 aa, Homo sapiens
QQLDTNPLT

SEQ ID NO: 14377 - protein, 9 aa, Homo sapiens
QQLDTYPLT

SEQ ID NO: 14378 - protein, 9 aa, Homo sapiens
QQLHTYPII

SEQ ID NO: 14379 - protein, 9 aa, Homo sapiens
QQLIDYPLT

SEQ ID NO: 14380 - protein, 9 aa, Homo sapiens
QQLIGYPLT

SEQ ID NO: 14381 - protein, 9 aa, Homo sapiens
QQLKSYPII

SEQ ID NO: 14382 - protein, 9 aa, Homo sapiens
QQLKSYPLT

SEQ ID NO: 14383 - protein, 9 aa, Homo sapiens
QQLKSYPVT

SEQ ID NO: 14384 - protein, 9 aa, Homo sapiens
QQLNNYPLT

SEQ ID NO: 14385 - protein, 9 aa, Homo sapiens
QQLNSDPLT

SEQ ID NO: 14386 - protein, 9 aa, Homo sapiens
QQLNSSPYT

SEQ ID NO: 14387 - protein, 10 aa, Homo sapiens
QQLNSYPALT

SEQ ID NO: 14388 - protein, 9 aa, Homo sapiens
QQLNSYPGT

SEQ ID NO: 14389 - protein, 9 aa, Homo sapiens
QQLNSYPIT

SEQ ID NO: 14390 - protein, 9 aa, Homo sapiens
QQLNSYPLT

SEQ ID NO: 14391 - protein, 10 aa, Homo sapiens
QQLNSYPPLT

SEQ ID NO: 14392 - protein, 9 aa, Homo sapiens
QQLNSYPPT

SEQ ID NO: 14393 - protein, 9 aa, Homo sapiens
QQLNSYPRT

SEQ ID NO: 14394 - protein, 9 aa, Homo sapiens
QQLNSYRFT

SEQ ID NO: 14395 - protein, 9 aa, Homo sapiens
QQLQAYPIT

SEQ ID NO: 14396 - protein, 9 aa, Homo sapiens
QQLYSYPDT

SEQ ID NO: 14397 - protein, 9 aa, Homo sapiens
QQLYSYPYT

SEQ ID NO: 14398 - protein, 9 aa, Homo sapiens
QQNHILPGT

SEQ ID NO: 14399 - protein, 9 aa, Homo sapiens
QQNHNLPGT

SEQ ID NO: 14400 - protein, 9 aa, Homo sapiens
QQNYEIPLT

SEQ ID NO: 14401 - protein, 9 aa, Homo sapiens
QQNYKTPRT

SEQ ID NO: 14402 - protein, 9 aa, Homo sapiens
QQPNSFPRT

SEQ ID NO: 14403 - protein, 10 aa, Homo sapiens
QQRANWPLLS

SEQ ID NO: 14404 - protein, 10 aa, Homo sapiens
QQRANWPPLT

SEQ ID NO: 14405 - protein, 9 aa, Homo sapiens
QQRDDWPRT

SEQ ID NO: 14406 - protein, 10 aa, Homo sapiens
QQRFNWPPIT

SEQ ID NO: 14407 - protein, 14 aa, Homo sapiens
QQRFYGLGTGAFDI

SEQ ID NO: 14408 - protein, 9 aa, Homo sapiens
QQRGNWLWT

SEQ ID NO: 14409 - protein, 10 aa, Homo sapiens
QQRGNWPPLT

SEQ ID NO: 14410 - protein, 9 aa, Homo sapiens
QQRGSWLWT

SEQ ID NO: 14411 - protein, 9 aa, Homo sapiens
QQRGTWPPT

SEQ ID NO: 14412 - protein, 10 aa, Homo sapiens
QQRIKRRVLT

SEQ ID NO: 14413 - protein, 11 aa, Homo sapiens
QQRINWPPSFT

SEQ ID NO: 14414 - protein, 10 aa, Homo sapiens
QQRLYWPPVT

SEQ ID NO: 14415 - protein, 10 aa, Homo sapiens
QQRNNWPPLT

SEQ ID NO: 14416 - protein, 9 aa, Homo sapiens
QQRNSWRYT

SEQ ID NO: 14417 - protein, 10 aa, Homo sapiens
QQRRYWPPLT

SEQ ID NO: 14418 - protein, 11 aa, Homo sapiens
QQRSDWPPTWT

SEQ ID NO: 14419 - protein, 11 aa, Homo sapiens
QQRSHWPPRFT

SEQ ID NO: 14420 - protein, 8 aa, Homo sapiens
QQRSIMIT

SEQ ID NO: 14421 - protein, 10 aa, Homo sapiens
QQRSKWPGIT

SEQ ID NO: 14422 - protein, 10 aa, Homo sapiens
QQRSKWPSIT

SEQ ID NO: 14423 - protein, 8 aa, Homo sapiens
QQRSNLRT

SEQ ID NO: 14424 - protein, 8 aa, Homo sapiens
QQRSNWIT

SEQ ID NO: 14425 - protein, 9 aa, Homo sapiens
QQRSNWLLT

SEQ ID NO: 14426 - protein, 8 aa, Homo sapiens
QQRSNWLT

SEQ ID NO: 14427 - protein, 10 aa, Homo sapiens
QQRSNWPALT

SEQ ID NO: 14428 - protein, 9 aa, Homo sapiens
QQRSNWPLT

SEQ ID NO: 14429 - protein, 11 aa, Homo sapiens
QQRSNWPPEYT

SEQ ID NO: 14430 - protein, 11 aa, Homo sapiens
QQRSNWPPGGT

SEQ ID NO: 14431 - protein, 11 aa, Homo sapiens
QQRSNWPPGIT

SEQ ID NO: 14432 - protein, 11 aa, Homo sapiens
QQRSNWPPGLT

SEQ ID NO: 14433 - protein, 10 aa, Homo sapiens
QQRSNWPPIT

SEQ ID NO: 14434 - protein, 10 aa, Homo sapiens
QQRSNWPSIT

SEQ ID NO: 14435 - protein, 10 aa, Homo sapiens
QQRSNWPSLT

SEQ ID NO: 14436 - protein, 10 aa, Homo sapiens
QQRSNWSTWT

SEQ ID NO: 14437 - protein, 9 aa, Homo sapiens
QQRSNWSWT

SEQ ID NO: 14438 - protein, 8 aa, Homo sapiens
QQRSNWWT

SEQ ID NO: 14439 - protein, 8 aa, Homo sapiens
QQRSSLRT

SEQ ID NO: 14440 - protein, 10 aa, Homo sapiens
QQRSSWLSLT

SEQ ID NO: 14441 - protein, 11 aa, Homo sapiens
QQRSSWPPLIT

SEQ ID NO: 14442 - protein, 10 aa, Homo sapiens
QQRSSWPTWT

SEQ ID NO: 14443 - protein, 7 aa, Homo sapiens
QQRSSYT

SEQ ID NO: 14444 - protein, 8 aa, Homo sapiens
QQRSTWPS

SEQ ID NO: 14445 - protein, 10 aa, Homo sapiens
QQRTNWPRIT

SEQ ID NO: 14446 - protein, 11 aa, Homo sapiens
QQRTSWPLEYS

SEQ ID NO: 14447 - protein, 9 aa, Homo sapiens
QQRYDWRII

SEQ ID NO: 14448 - protein, 10 aa, Homo sapiens
QQRYNWPPIT

SEQ ID NO: 14449 - protein, 10 aa, Homo sapiens
QQRYNWPPLT

SEQ ID NO: 14450 - protein, 10 aa, Homo sapiens
QQSDNWPPLT

SEQ ID NO: 14451 - protein, 9 aa, Homo sapiens
QQSDSLSRT

SEQ ID NO: 14452 - protein, 10 aa, Homo sapiens
QQSDSTPPKT

SEQ ID NO: 14453 - protein, 9 aa, Homo sapiens
QQSFAFPIT

SEQ ID NO: 14454 - protein, 9 aa, Homo sapiens
QQSFGFPIT

SEQ ID NO: 14455 - protein, 7 aa, Homo sapiens
QQSFMYT

SEQ ID NO: 14456 - protein, 10 aa, Homo sapiens
QQSFNTPPYT

SEQ ID NO: 14457 - protein, 8 aa, Homo sapiens
QQSFSMYN

SEQ ID NO: 14458 - protein, 9 aa, Homo sapiens
QQSFSSQLS

SEQ ID NO: 14459 - protein, 9 aa, Homo sapiens
QQSGASPWT

SEQ ID NO: 14460 - protein, 9 aa, Homo sapiens
QQSGRSPYT

SEQ ID NO: 14461 - protein, 9 aa, Homo sapiens
QQSGSSPRT

SEQ ID NO: 14462 - protein, 9 aa, Homo sapiens
QQSGSSTST

SEQ ID NO: 14463 - protein, 9 aa, Homo sapiens
QQSHSFPIT

SEQ ID NO: 14464 - protein, 9 aa, Homo sapiens
QQSHSLPLT

SEQ ID NO: 14465 - protein, 10 aa, Homo sapiens
QQSHSTSPKT

SEQ ID NO: 14466 - protein, 8 aa, Homo sapiens
QQSKSYFM

SEQ ID NO: 14467 - protein, 9 aa, Homo sapiens
QQSKTLPLT

SEQ ID NO: 14468 - protein, 10 aa, Homo sapiens
QQSNNWPPLT

SEQ ID NO: 14469 - protein, 10 aa, Homo sapiens
QQSNSFPPLT

SEQ ID NO: 14470 - protein, 9 aa, Homo sapiens
QQSYDIPQT

SEQ ID NO: 14471 - protein, 9 aa, Homo sapiens
QQSYDTPNT

SEQ ID NO: 14472 - protein, 9 aa, Homo sapiens
QQSYDTPQT

SEQ ID NO: 14473 - protein, 9 aa, Homo sapiens
QQSYDTPRT

SEQ ID NO: 14474 - protein, 9 aa, Homo sapiens
QQSYDTPWT

SEQ ID NO: 14475 - protein, 10 aa, Homo sapiens
QQSYHTPPYT

SEQ ID NO: 14476 - protein, 9 aa, Homo sapiens
QQSYITLWT

SEQ ID NO: 14477 - protein, 9 aa, Homo sapiens
QQSYITPRT

SEQ ID NO: 14478 - protein, 9 aa, Homo sapiens
QQSYITPWT

SEQ ID NO: 14479 - protein, 9 aa, Homo sapiens
QQSYITPYS

SEQ ID NO: 14480 - protein, 9 aa, Homo sapiens
QQSYITPYT

SEQ ID NO: 14481 - protein, 9 aa, Homo sapiens
QQSYKTPFT

SEQ ID NO: 14482 - protein, 9 aa, Homo sapiens
QQSYNAPYT

SEQ ID NO: 14483 - protein, 9 aa, Homo sapiens
QQSYNNPVT

SEQ ID NO: 14484 - protein, 9 aa, Homo sapiens
QQSYNTPIT

SEQ ID NO: 14485 - protein, 9 aa, Homo sapiens
QQSYNTPNT

SEQ ID NO: 14486 - protein, 10 aa, Homo sapiens
QQSYNTPPKT

SEQ ID NO: 14487 - protein, 11 aa, Homo sapiens
QQSYNTPPMYT

SEQ ID NO: 14488 - protein, 9 aa, Homo sapiens
QQSYNTPQT

SEQ ID NO: 14489 - protein, 9 aa, Homo sapiens
QQSYNTPYT

SEQ ID NO: 14490 - protein, 9 aa, Homo sapiens
QQSYNVPNT

SEQ ID NO: 14491 - protein, 9 aa, Homo sapiens
QQSYNVVPT

SEQ ID NO: 14492 - protein, 9 aa, Homo sapiens
QQSYRNPVT

SEQ ID NO: 14493 - protein, 8 aa, Homo sapiens
QQSYRTPG

SEQ ID NO: 14494 - protein, 10 aa, Homo sapiens
QQSYSAPSYT

SEQ ID NO: 14495 - protein, 9 aa, Homo sapiens
QQSYSFPIT

SEQ ID NO: 14496 - protein, 9 aa, Homo sapiens
QQSYSFPTT

SEQ ID NO: 14497 - protein, 10 aa, Homo sapiens
QQSYSHPRVT

SEQ ID NO: 14498 - protein, 9 aa, Homo sapiens
QQSYSILFT

SEQ ID NO: 14499 - protein, 9 aa, Homo sapiens
QQSYSIPNT

SEQ ID NO: 14500 - protein, 9 aa, Homo sapiens
QQSYSKLWT

SEQ ID NO: 14501 - protein, 9 aa, Homo sapiens
QQSYSLLYS

SEQ ID NO: 14502 - protein, 9 aa, Homo sapiens
QQSYSNPRT

SEQ ID NO: 14503 - protein, 9 aa, Homo sapiens
QQSYSPPLT

SEQ ID NO: 14504 - protein, 8 aa, Homo sapiens
QQSYSSLT

SEQ ID NO: 14505 - protein, 9 aa, Homo sapiens
QQSYSSPFA

SEQ ID NO: 14506 - protein, 9 aa, Homo sapiens
QQSYSSPFT

SEQ ID NO: 14507 - protein, 11 aa, Homo sapiens
QQSYSSPPEPT

SEQ ID NO: 14508 - protein, 9 aa, Homo sapiens
QQSYSSPWT

SEQ ID NO: 14509 - protein, 8 aa, Homo sapiens
QQSYSTGA

SEQ ID NO: 14510 - protein, 9 aa, Homo sapiens
QQSYSTLWT

SEQ ID NO: 14511 - protein, 9 aa, Homo sapiens
QQSYSTPFT

SEQ ID NO: 14512 - protein, 9 aa, Homo sapiens
QQSYSTPKT

SEQ ID NO: 14513 - protein, 9 aa, Homo sapiens
QQSYSTPPA

SEQ ID NO: 14514 - protein, 10 aa, Homo sapiens
QQSYSTPPLT

SEQ ID NO: 14515 - protein, 9 aa, Homo sapiens
QQSYSTPPT

SEQ ID NO: 14516 - protein, 10 aa, Homo sapiens
QQSYSTPPWT

SEQ ID NO: 14517 - protein, 10 aa, Homo sapiens
QQSYSTPPYT

SEQ ID NO: 14518 - protein, 9 aa, Homo sapiens
QQSYSTPQT

SEQ ID NO: 14519 - protein, 9 aa, Homo sapiens
QQSYSTPRT

SEQ ID NO: 14520 - protein, 10 aa, Homo sapiens
QQSYSTPRVT

SEQ ID NO: 14521 - protein, 10 aa, Homo sapiens
QQSYSTPRYT

SEQ ID NO: 14522 - protein, 9 aa, Homo sapiens
QQSYSTPST

SEQ ID NO: 14523 - protein, 8 aa, Homo sapiens
QQSYSTPT

SEQ ID NO: 14524 - protein, 9 aa, Homo sapiens
QQSYSTPWT

SEQ ID NO: 14525 - protein, 17 aa, Homo sapiens
QQSYSTPYNHKYGTPYT

SEQ ID NO: 14526 - protein, 9 aa, Homo sapiens
QQSYSTQLT

SEQ ID NO: 14527 - protein, 8 aa, Homo sapiens
QQSYSTRT

SEQ ID NO: 14528 - protein, 9 aa, Homo sapiens
QQSYSTSRT

SEQ ID NO: 14529 - protein, 10 aa, Homo sapiens
QQSYTTPPFT

SEQ ID NO: 14530 - protein, 9 aa, Homo sapiens
QQSYTTPQT

SEQ ID NO: 14531 - protein, 9 aa, Homo sapiens
QQSYTTPWT

SEQ ID NO: 14532 - protein, 9 aa, Homo sapiens
QQSYTTPYT

SEQ ID NO: 14533 - protein, 9 aa, Homo sapiens
QQSYTTVLT

SEQ ID NO: 14534 - protein, 9 aa, Homo sapiens
QQSYTVVPT

SEQ ID NO: 14535 - protein, 9 aa, Homo sapiens
QQTEEAPYT

SEQ ID NO: 14536 - protein, 9 aa, Homo sapiens
QQTFSTLVT

SEQ ID NO: 14537 - protein, 9 aa, Homo sapiens
QQTGNVPYT

SEQ ID NO: 14538 - protein, 9 aa, Homo sapiens
QQTNSFPRT

SEQ ID NO: 14539 - protein, 9 aa, Homo sapiens
QQTQSLPLT

SEQ ID NO: 14540 - protein, 9 aa, Homo sapiens
QQTYDTPWT

SEQ ID NO: 14541 - protein, 9 aa, Homo sapiens
QQTYGRVLT

SEQ ID NO: 14542 - protein, 8 aa, Homo sapiens
QQTYNLCS

SEQ ID NO: 14543 - protein, 9 aa, Homo sapiens
QQTYNNPIT

SEQ ID NO: 14544 - protein, 9 aa, Homo sapiens
QQTYNTPTT

SEQ ID NO: 14545 - protein, 8 aa, Homo sapiens
QQTYSAPS

SEQ ID NO: 14546 - protein, 9 aa, Homo sapiens
QQTYSRPYS

SEQ ID NO: 14547 - protein, 9 aa, Homo sapiens
QQTYSSPPT

SEQ ID NO: 14548 - protein, 10 aa, Homo sapiens
QQTYSSRALS

SEQ ID NO: 14549 - protein, 9 aa, Homo sapiens
QQTYSTPIT

SEQ ID NO: 14550 - protein, 10 aa, Homo sapiens
QQTYTNPRVT

SEQ ID NO: 14551 - protein, 9 aa, Homo sapiens
QQTYTTPLT

SEQ ID NO: 14552 - protein, 9 aa, Homo sapiens
QQVDRYPLT

SEQ ID NO: 14553 - protein, 9 aa, Homo sapiens
QQVHSYPLT

SEQ ID NO: 14554 - protein, 9 aa, Homo sapiens
QQVNSFALT

SEQ ID NO: 14555 - protein, 9 aa, Homo sapiens
QQWINSRWT

SEQ ID NO: 14556 - protein, 9 aa, Homo sapiens
QQYANLPLT

SEQ ID NO: 14557 - protein, 9 aa, Homo sapiens
QQYANWLNS

SEQ ID NO: 14558 - protein, 8 aa, Homo sapiens
QQYASSSS

SEQ ID NO: 14559 - protein, 9 aa, Homo sapiens
QQYASSTFT

SEQ ID NO: 14560 - protein, 10 aa, Homo sapiens
QQYATSPGIT

SEQ ID NO: 14561 - protein, 9 aa, Homo sapiens
QQYATSPRA

SEQ ID NO: 14562 - protein, 10 aa, Homo sapiens
QQYDDLPPWT

SEQ ID NO: 14563 - protein, 9 aa, Homo sapiens
QQYDDLPYT

SEQ ID NO: 14564 - protein, 9 aa, Homo sapiens
QQYDGWPRL

SEQ ID NO: 14565 - protein, 9 aa, Homo sapiens
QQYDISPGT

SEQ ID NO: 14566 - protein, 8 aa, Homo sapiens
QQYDIVLT

SEQ ID NO: 14567 - protein, 9 aa, Homo sapiens
QQYDLYPYS

SEQ ID NO: 14568 - protein, 9 aa, Homo sapiens
QQYDMSPAT

SEQ ID NO: 14569 - protein, 9 aa, Homo sapiens
QQYDNFPLA

SEQ ID NO: 14570 - protein, 10 aa, Homo sapiens
QQYDNFYPYT

SEQ ID NO: 14571 - protein, 8 aa, Homo sapiens
QQYDNLIT

SEQ ID NO: 14572 - protein, 10 aa, Homo sapiens
QQYDNLLSIT

SEQ ID NO: 14573 - protein, 10 aa, Homo sapiens
QQYDNLLSLT

SEQ ID NO: 14574 - protein, 8 aa, Homo sapiens
QQYDNLPL

SEQ ID NO: 14575 - protein, 9 aa, Homo sapiens
QQYDNLPLT

SEQ ID NO: 14576 - protein, 10 aa, Homo sapiens
QQYDNLPPFT

SEQ ID NO: 14577 - protein, 9 aa, Homo sapiens
QQYDNLPPT

SEQ ID NO: 14578 - protein, 9 aa, Homo sapiens
QQYDNLPRL

SEQ ID NO: 14579 - protein, 9 aa, Homo sapiens
QQYDNLPRT

SEQ ID NO: 14580 - protein, 9 aa, Homo sapiens
QQYDNLPVT

SEQ ID NO: 14581 - protein, 9 aa, Homo sapiens
QQYDNLPYT

SEQ ID NO: 14582 - protein, 8 aa, Homo sapiens
QQYDNLST

SEQ ID NO: 14583 - protein, 9 aa, Homo sapiens
QQYDNRPLT

SEQ ID NO: 14584 - protein, 9 aa, Homo sapiens
QQYDNRPPT

SEQ ID NO: 14585 - protein, 9 aa, Homo sapiens
QQYDNSPPT

SEQ ID NO: 14586 - protein, 10 aa, Homo sapiens
QQYDNWPPIT

SEQ ID NO: 14587 - protein, 10 aa, Homo sapiens
QQYDNWPPWT

SEQ ID NO: 14588 - protein, 9 aa, Homo sapiens
QQYDNWPRT

SEQ ID NO: 14589 - protein, 9 aa, Homo sapiens
QQYDNYPPT

SEQ ID NO: 14590 - protein, 10 aa, Homo sapiens
QQYDRSSLYS

SEQ ID NO: 14591 - protein, 10 aa, Homo sapiens
QQYDRSSMYT

SEQ ID NO: 14592 - protein, 9 aa, Homo sapiens
QQYDRTPLT

SEQ ID NO: 14593 - protein, 9 aa, Homo sapiens
QQYDSFPPT

SEQ ID NO: 14594 - protein, 9 aa, Homo sapiens
QQYDSSILT

SEQ ID NO: 14595 - protein, 9 aa, Homo sapiens
QQYDSSPAT

SEQ ID NO: 14596 - protein, 9 aa, Homo sapiens
QQYDSSPFT

SEQ ID NO: 14597 - protein, 9 aa, Homo sapiens
QQYDSSPRT

SEQ ID NO: 14598 - protein, 9 aa, Homo sapiens
QQYDSSPYT

SEQ ID NO: 14599 - protein, 9 aa, Homo sapiens
QQYDSSTFT

SEQ ID NO: 14600 - protein, 8 aa, Homo sapiens
QQYDSSVT

SEQ ID NO: 14601 - protein, 9 aa, Homo sapiens
QQYDSYPYT

SEQ ID NO: 14602 - protein, 9 aa, Homo sapiens
QQYDSYSGA

SEQ ID NO: 14603 - protein, 9 aa, Homo sapiens
QQYDSYSGM

SEQ ID NO: 14604 - protein, 10 aa, Homo sapiens
QQYDTWPPWT

SEQ ID NO: 14605 - protein, 8 aa, Homo sapiens
QQYDTWSS

SEQ ID NO: 14606 - protein, 9 aa, Homo sapiens
QQYDTYSSQ

SEQ ID NO: 14607 - protein, 9 aa, Homo sapiens
QQYDVSPGT

SEQ ID NO: 14608 - protein, 9 aa, Homo sapiens
QQYDVYSRT

SEQ ID NO: 14609 - protein, 9 aa, Homo sapiens
QQYESYSWT

SEQ ID NO: 14610 - protein, 9 aa, Homo sapiens
QQYETSSLT

SEQ ID NO: 14611 - protein, 9 aa, Homo sapiens
QQYFGLPLT

SEQ ID NO: 14612 - protein, 9 aa, Homo sapiens
QQYFLTPLT

SEQ ID NO: 14613 - protein, 10 aa, Homo sapiens
QQYFNWPPLT

SEQ ID NO: 14614 - protein, 10 aa, Homo sapiens
QQYGASPMYT

SEQ ID NO: 14615 - protein, 9 aa, Homo sapiens
QQYGASPRT

SEQ ID NO: 14616 - protein, 9 aa, Homo sapiens
QQYGDSKYS

SEQ ID NO: 14617 - protein, 10 aa, Homo sapiens
QQYGDSLSLT

SEQ ID NO: 14618 - protein, 9 aa, Homo sapiens
QQYGDSPFT

SEQ ID NO: 14619 - protein, 9 aa, Homo sapiens
QQYGDSPGT

SEQ ID NO: 14620 - protein, 9 aa, Homo sapiens
QQYGDSPLT

SEQ ID NO: 14621 - protein, 9 aa, Homo sapiens
QQYGDSPRT

SEQ ID NO: 14622 - protein, 9 aa, Homo sapiens
QQYGGASRT

SEQ ID NO: 14623 - protein, 10 aa, Homo sapiens
QQYGGSPGYT

SEQ ID NO: 14624 - protein, 9 aa, Homo sapiens
QQYGGSPIT

SEQ ID NO: 14625 - protein, 9 aa, Homo sapiens
QQYGGSPLT

SEQ ID NO: 14626 - protein, 10 aa, Homo sapiens
QQYGGSPRIT

SEQ ID NO: 14627 - protein, 9 aa, Homo sapiens
QQYGGSPRT

SEQ ID NO: 14628 - protein, 9 aa, Homo sapiens
QQYGGSPST

SEQ ID NO: 14629 - protein, 9 aa, Homo sapiens
QQYGGSPYS

SEQ ID NO: 14630 - protein, 9 aa, Homo sapiens
QQYGGSSGT

SEQ ID NO: 14631 - protein, 9 aa, Homo sapiens
QQYGGSTGT

SEQ ID NO: 14632 - protein, 8 aa, Homo sapiens
QQYGIPVT

SEQ ID NO: 14633 - protein, 10 aa, Homo sapiens
QQYGNSLTWT

SEQ ID NO: 14634 - protein, 9 aa, Homo sapiens
QQYGNSLYT

SEQ ID NO: 14635 - protein, 9 aa, Homo sapiens
QQYGNSPFT

SEQ ID NO: 14636 - protein, 9 aa, Homo sapiens
QQYGNSPGT

SEQ ID NO: 14637 - protein, 9 aa, Homo sapiens
QQYGNSPLT

SEQ ID NO: 14638 - protein, 9 aa, Homo sapiens
QQYGNSPQT

SEQ ID NO: 14639 - protein, 9 aa, Homo sapiens
QQYGNSPRT

SEQ ID NO: 14640 - protein, 10 aa, Homo sapiens
QQYGNSPRVT

SEQ ID NO: 14641 - protein, 8 aa, Homo sapiens
QQYGNSPT

SEQ ID NO: 14642 - protein, 16 aa, Homo sapiens
QQYGNSPTFGQGTSPT

SEQ ID NO: 14643 - protein, 9 aa, Homo sapiens
QQYGRFPWT

SEQ ID NO: 14644 - protein, 8 aa, Homo sapiens
QQYGRSLS

SEQ ID NO: 14645 - protein, 9 aa, Homo sapiens
QQYGRSPFT

SEQ ID NO: 14646 - protein, 10 aa, Homo sapiens
QQYGRSPGLT

SEQ ID NO: 14647 - protein, 9 aa, Homo sapiens
QQYGRSPLT

SEQ ID NO: 14648 - protein, 9 aa, Homo sapiens
QQYGRSPRT

SEQ ID NO: 14649 - protein, 6 aa, Homo sapiens
QQYGRT

SEQ ID NO: 14650 - protein, 9 aa, Homo sapiens
QQYGSAQYT

SEQ ID NO: 14651 - protein, 9 aa, Homo sapiens
QQYGSFLYS

SEQ ID NO: 14652 - protein, 9 aa, Homo sapiens
QQYGSLPGT

SEQ ID NO: 14653 - protein, 7 aa, Homo sapiens
QQYGSQT

SEQ ID NO: 14654 - protein, 9 aa, Homo sapiens
QQYGSSGLT

SEQ ID NO: 14655 - protein, 9 aa, Homo sapiens
QQYGSSIFT

SEQ ID NO: 14656 - protein, 9 aa, Homo sapiens
QQYGSSILT

SEQ ID NO: 14657 - protein, 9 aa, Homo sapiens
QQYGSSLLT

SEQ ID NO: 14658 - protein, 10 aa, Homo sapiens
QQYGSSLPAT

SEQ ID NO: 14659 - protein, 10 aa, Homo sapiens
QQYGSSLTWT

SEQ ID NO: 14660 - protein, 9 aa, Homo sapiens
QQYGSSLWT

SEQ ID NO: 14661 - protein, 9 aa, Homo sapiens
QQYGSSLYT

SEQ ID NO: 14662 - protein, 9 aa, Homo sapiens
QQYGSSPCT

SEQ ID NO: 14663 - protein, 9 aa, Homo sapiens
QQYGSSPET

SEQ ID NO: 14664 - protein, 9 aa, Homo sapiens
QQYGSSPFT

SEQ ID NO: 14665 - protein, 10 aa, Homo sapiens
QQYGSSPGFT

SEQ ID NO: 14666 - protein, 9 aa, Homo sapiens
QQYGSSPGT

SEQ ID NO: 14667 - protein, 9 aa, Homo sapiens
QQYGSSPIT

SEQ ID NO: 14668 - protein, 8 aa, Homo sapiens
QQYGSSPL

SEQ ID NO: 14669 - protein, 10 aa, Homo sapiens
QQYGSSPLFT

SEQ ID NO: 14670 - protein, 9 aa, Homo sapiens
QQYGSSPLI

SEQ ID NO: 14671 - protein, 9 aa, Homo sapiens
QQYGSSPLT

SEQ ID NO: 14672 - protein, 10 aa, Homo sapiens
QQYGSSPLYT

SEQ ID NO: 14673 - protein, 11 aa, Homo sapiens
QQYGSSPPGYT

SEQ ID NO: 14674 - protein, 10 aa, Homo sapiens
QQYGSSPPIT

SEQ ID NO: 14675 - protein, 10 aa, Homo sapiens
QQYGSSPPLT

SEQ ID NO: 14676 - protein, 9 aa, Homo sapiens
QQYGSSPPT

SEQ ID NO: 14677 - protein, 10 aa, Homo sapiens
QQYGSSPPWT

SEQ ID NO: 14678 - protein, 10 aa, Homo sapiens
QQYGSSPPYT

SEQ ID NO: 14679 - protein, 10 aa, Homo sapiens
QQYGSSPQLT

SEQ ID NO: 14680 - protein, 9 aa, Homo sapiens
QQYGSSPQT

SEQ ID NO: 14681 - protein, 9 aa, Homo sapiens
QQYGSSPRA

SEQ ID NO: 14682 - protein, 10 aa, Homo sapiens
QQYGSSPRFT

SEQ ID NO: 14683 - protein, 11 aa, Homo sapiens
QQYGSSPRGLT

SEQ ID NO: 14684 - protein, 11 aa, Homo sapiens
QQYGSSPRGPT

SEQ ID NO: 14685 - protein, 9 aa, Homo sapiens
QQYGSSPRT

SEQ ID NO: 14686 - protein, 10 aa, Homo sapiens
QQYGSSPRYT

SEQ ID NO: 14687 - protein, 9 aa, Homo sapiens
QQYGSSPST

SEQ ID NO: 14688 - protein, 8 aa, Homo sapiens
QQYGSSPT

SEQ ID NO: 14689 - protein, 9 aa, Homo sapiens
QQYGSSPTT

SEQ ID NO: 14690 - protein, 9 aa, Homo sapiens
QQYGSSPVT

SEQ ID NO: 14691 - protein, 9 aa, Homo sapiens
QQYGSSPWA

SEQ ID NO: 14692 - protein, 9 aa, Homo sapiens
QQYGSSPWT

SEQ ID NO: 14693 - protein, 9 aa, Homo sapiens
QQYGSSPYT

SEQ ID NO: 14694 - protein, 9 aa, Homo sapiens
QQYGSSQYT

SEQ ID NO: 14695 - protein, 9 aa, Homo sapiens
QQYGSSRRT

SEQ ID NO: 14696 - protein, 8 aa, Homo sapiens
QQYGSSRT

SEQ ID NO: 14697 - protein, 9 aa, Homo sapiens
QQYGSSSLT

SEQ ID NO: 14698 - protein, 9 aa, Homo sapiens
QQYGSSSTT

SEQ ID NO: 14699 - protein, 9 aa, Homo sapiens
QQYGSSSVT

SEQ ID NO: 14700 - protein, 9 aa, Homo sapiens
QQYGSSTFT

SEQ ID NO: 14701 - protein, 9 aa, Homo sapiens
QQYGSSTLT

SEQ ID NO: 14702 - protein, 10 aa, Homo sapiens
QQYGSSVALT

SEQ ID NO: 14703 - protein, 8 aa, Homo sapiens
QQYGSSVT

SEQ ID NO: 14704 - protein, 9 aa, Homo sapiens
QQYGSSVWT

SEQ ID NO: 14705 - protein, 10 aa, Homo sapiens
QQYGSTPPST

SEQ ID NO: 14706 - protein, 9 aa, Homo sapiens
QQYGTLQLT

SEQ ID NO: 14707 - protein, 8 aa, Homo sapiens
QQYGTSFT

SEQ ID NO: 14708 - protein, 10 aa, Homo sapiens
QQYGTSHSFT

SEQ ID NO: 14709 - protein, 8 aa, Homo sapiens
QQYGTSKS

SEQ ID NO: 14710 - protein, 9 aa, Homo sapiens
QQYGTSPFT

SEQ ID NO: 14711 - protein, 9 aa, Homo sapiens
QQYGTSPGT

SEQ ID NO: 14712 - protein, 10 aa, Homo sapiens
QQYGTSPPYT

SEQ ID NO: 14713 - protein, 9 aa, Homo sapiens
QQYGTSPRT

SEQ ID NO: 14714 - protein, 8 aa, Homo sapiens
QQYGTSPT

SEQ ID NO: 14715 - protein, 9 aa, Homo sapiens
QQYGTSPWT

SEQ ID NO: 14716 - protein, 9 aa, Homo sapiens
QQYGTSPYT

SEQ ID NO: 14717 - protein, 9 aa, Homo sapiens
QQYGTSQNT

SEQ ID NO: 14718 - protein, 10 aa, Homo sapiens
QQYGTSSMYT

SEQ ID NO: 14719 - protein, 9 aa, Homo sapiens
QQYGTSTFT

SEQ ID NO: 14720 - protein, 8 aa, Homo sapiens
QQYGTWYT

SEQ ID NO: 14721 - protein, 9 aa, Homo sapiens
QQYGVSPGT

SEQ ID NO: 14722 - protein, 9 aa, Homo sapiens
QQYHNLPIT

SEQ ID NO: 14723 - protein, 11 aa, Homo sapiens
QQYHNWPPAYT

SEQ ID NO: 14724 - protein, 10 aa, Homo sapiens
QQYHNWPPIT

SEQ ID NO: 14725 - protein, 10 aa, Homo sapiens
QQYHNWPPLT

SEQ ID NO: 14726 - protein, 9 aa, Homo sapiens
QQYHSPPLT

SEQ ID NO: 14727 - protein, 10 aa, Homo sapiens
QQYHSWPPLT

SEQ ID NO: 14728 - protein, 9 aa, Homo sapiens
QQYHSYPIT

SEQ ID NO: 14729 - protein, 9 aa, Homo sapiens
QQYHSYPWT

SEQ ID NO: 14730 - protein, 10 aa, Homo sapiens
QQYHTFSPST

SEQ ID NO: 14731 - protein, 10 aa, Homo sapiens
QQYHTWPPWT

SEQ ID NO: 14732 - protein, 9 aa, Homo sapiens
QQYISYPLT

SEQ ID NO: 14733 - protein, 10 aa, Homo sapiens
QQYKNWPSYS

SEQ ID NO: 14734 - protein, 9 aa, Homo sapiens
QQYKNYPYT

SEQ ID NO: 14735 - protein, 9 aa, Homo sapiens
QQYKSYPLT

SEQ ID NO: 14736 - protein, 10 aa, Homo sapiens
QQYKSYSFLS

SEQ ID NO: 14737 - protein, 9 aa, Homo sapiens
QQYKSYSPT

SEQ ID NO: 14738 - protein, 10 aa, Homo sapiens
QQYKSYSQWT

SEQ ID NO: 14739 - protein, 10 aa, Homo sapiens
QQYKSYSSWT

SEQ ID NO: 14740 - protein, 9 aa, Homo sapiens
QQYKSYSYT

SEQ ID NO: 14741 - protein, 9 aa, Homo sapiens
QQYKTNPYT

SEQ ID NO: 14742 - protein, 9 aa, Homo sapiens
QQYKTYPWT

SEQ ID NO: 14743 - protein, 10 aa, Homo sapiens
QQYLNWPPIT

SEQ ID NO: 14744 - protein, 9 aa, Homo sapiens
QQYNDWLLT

SEQ ID NO: 14745 - protein, 9 aa, Homo sapiens
QQYNDWPKT

SEQ ID NO: 14746 - protein, 10 aa, Homo sapiens
QQYNDWPPLT

SEQ ID NO: 14747 - protein, 10 aa, Homo sapiens
QQYNDWPPWT

SEQ ID NO: 14748 - protein, 9 aa, Homo sapiens
QQYNDWPRG

SEQ ID NO: 14749 - protein, 9 aa, Homo sapiens
QQYNDWPRT

SEQ ID NO: 14750 - protein, 9 aa, Homo sapiens
QQYNDWPYT

SEQ ID NO: 14751 - protein, 10 aa, Homo sapiens
QQYNEWTPLT

SEQ ID NO: 14752 - protein, 9 aa, Homo sapiens
QQYNGYSLT

SEQ ID NO: 14753 - protein, 10 aa, Homo sapiens
QQYNHWPPLT

SEQ ID NO: 14754 - protein, 9 aa, Homo sapiens
QQYNHWPRM

SEQ ID NO: 14755 - protein, 10 aa, Homo sapiens
QQYNIWPPLT

SEQ ID NO: 14756 - protein, 9 aa, Homo sapiens
QQYNIWPRM

SEQ ID NO: 14757 - protein, 14 aa, Homo sapiens
QQYNKQDNKWPLIT

SEQ ID NO: 14758 - protein, 9 aa, Homo sapiens
QQYNKWPLT

SEQ ID NO: 14759 - protein, 9 aa, Homo sapiens
QQYNMWPWT

SEQ ID NO: 14760 - protein, 8 aa, Homo sapiens
QQYNNWLT

SEQ ID NO: 14761 - protein, 8 aa, Homo sapiens
QQYNNWPC

SEQ ID NO: 14762 - protein, 8 aa, Homo sapiens
QQYNNWPF

SEQ ID NO: 14763 - protein, 8 aa, Homo sapiens
QQYNNWPG

SEQ ID NO: 14764 - protein, 9 aa, Homo sapiens
QQYNNWPGD

SEQ ID NO: 14765 - protein, 9 aa, Homo sapiens
QQYNNWPIT

SEQ ID NO: 14766 - protein, 8 aa, Homo sapiens
QQYNNWPL

SEQ ID NO: 14767 - protein, 9 aa, Homo sapiens
QQYNNWPLT

SEQ ID NO: 14768 - protein, 10 aa, Homo sapiens
QQYNNWPMYT

SEQ ID NO: 14769 - protein, 10 aa, Homo sapiens
QQYNNWPPAT

SEQ ID NO: 14770 - protein, 10 aa, Homo sapiens
QQYNNWPPDT

SEQ ID NO: 14771 - protein, 12 aa, Homo sapiens
QQYNNWPPGEDT

SEQ ID NO: 14772 - protein, 10 aa, Homo sapiens
QQYNNWPPIT

SEQ ID NO: 14773 - protein, 11 aa, Homo sapiens
QQYNNWPPKLT

SEQ ID NO: 14774 - protein, 10 aa, Homo sapiens
QQYNNWPPKT

SEQ ID NO: 14775 - protein, 10 aa, Homo sapiens
QQYNNWPPLT

SEQ ID NO: 14776 - protein, 11 aa, Homo sapiens
QQYNNWPPRLT

SEQ ID NO: 14777 - protein, 9 aa, Homo sapiens
QQYNNWPPT

SEQ ID NO: 14778 - protein, 10 aa, Homo sapiens
QQYNNWPPVT

SEQ ID NO: 14779 - protein, 10 aa, Homo sapiens
QQYNNWPPWS

SEQ ID NO: 14780 - protein, 10 aa, Homo sapiens [sequence omitted]

SEQ ID NO: 14781 - protein, 10 aa, Homo sapiens
QQYNNWPPYS

SEQ ID NO: 14782 - protein, 10 aa, Homo sapiens
QQYNNWPPYT

SEQ ID NO: 14783 - protein, 9 aa, Homo sapiens
QQYNNWPQT

SEQ ID NO: 14784 - protein, 10 aa, Homo sapiens
QQYNNWPQWT

SEQ ID NO: 14785 - protein, 11 aa, Homo sapiens
QQYNNWPRALT

SEQ ID NO: 14786 - protein, 9 aa, Homo sapiens
QQYNNWPRM

SEQ ID NO: 14787 - protein, 9 aa, Homo sapiens
QQYNNWPRT

SEQ ID NO: 14788 - protein, 9 aa, Homo sapiens
QQYNNWPRV

SEQ ID NO: 14789 - protein, 10 aa, Homo sapiens
QQYNNWPRWT

SEQ ID NO: 14790 - protein, 10 aa, Homo sapiens
QQYNNWPRYT

SEQ ID NO: 14791 - protein, 8 aa, Homo sapiens
QQYNNWPS

SEQ ID NO: 14792 - protein, 10 aa, Homo sapiens
QQYNNWPSAT

SEQ ID NO: 14793 - protein, 10 aa, Homo sapiens
QQYNNWPSYS

SEQ ID NO: 14794 - protein, 8 aa, Homo sapiens
QQYNNWPT

SEQ ID NO: 14795 - protein, 8 aa, Homo sapiens
QQYNNWPV

SEQ ID NO: 14796 - protein, 9 aa, Homo sapiens
QQYNNWPWT

SEQ ID NO: 14797 - protein, 8 aa, Homo sapiens
QQYNNWQT

SEQ ID NO: 14798 - protein, 10 aa, Homo sapiens
QQYNNWSALT

SEQ ID NO: 14799 - protein, 9 aa, Homo sapiens
QQYNNWWYT

SEQ ID NO: 14800 - protein, 9 aa, Homo sapiens
QQYNNYFFT

SEQ ID NO: 14801 - protein, 9 aa, Homo sapiens
QQYNNYPPT

SEQ ID NO: 14802 - protein, 9 aa, Homo sapiens
QQYNNYPWT

SEQ ID NO: 14803 - protein, 9 aa, Homo sapiens
QQYNRYPLT

SEQ ID NO: 14804 - protein, 10 aa, Homo sapiens
QQYNSFLTYT

SEQ ID NO: 14805 - protein, 9 aa, Homo sapiens
QQYNSFPYT

SEQ ID NO: 14806 - protein, 10 aa, Homo sapiens
QQYNSFSGYT

SEQ ID NO: 14807 - protein, 8 aa, Homo sapiens
QQYNSLST

SEQ ID NO: 14808 - protein, 9 aa, Homo sapiens
QQYNSNFLT

SEQ ID NO: 14809 - protein, 9 aa, Homo sapiens
QQYNSPTWT

SEQ ID NO: 14810 - protein, 9 aa, Homo sapiens
QQYNSQWCT

SEQ ID NO: 14811 - protein, 9 aa, Homo sapiens
QQYNSSPYT

SEQ ID NO: 14812 - protein, 10 aa, Homo sapiens
QQYNSVLGAT

SEQ ID NO: 14813 - protein, 9 aa, Homo sapiens
QQYNSWLIT

SEQ ID NO: 14814 - protein, 11 aa, Homo sapiens
QQYNSWPPMYT

SEQ ID NO: 14815 - protein, 9 aa, Homo sapiens
QQYNSWPRT

SEQ ID NO: 14816 - protein, 10 aa, Homo sapiens
QQYNSYASYT

SEQ ID NO: 14817 - protein, 9 aa, Homo sapiens
QQYNSYFAT

SEQ ID NO: 14818 - protein, 9 aa, Homo sapiens
QQYNSYFYT

SEQ ID NO: 14819 - protein, 9 aa, Homo sapiens
QQYNSYLFT

SEQ ID NO: 14820 - protein, 9 aa, Homo sapiens
QQYNSYLGT

SEQ ID NO: 14821 - protein, 9 aa, Homo sapiens
QQYNSYLIT

SEQ ID NO: 14822 - protein, 9 aa, Homo sapiens
QQYNSYLLT

SEQ ID NO: 14823 - protein, 10 aa, Homo sapiens
QQYNSYLPWT

SEQ ID NO: 14824 - protein, 9 aa, Homo sapiens
QQYNSYLVT

SEQ ID NO: 14825 - protein, 9 aa, Homo sapiens
QQYNSYLYT

SEQ ID NO: 14826 - protein, 9 aa, Homo sapiens
QQYNSYPLT

SEQ ID NO: 14827 - protein, 9 aa, Homo sapiens
QQYNSYPQT

SEQ ID NO: 14828 - protein, 9 aa, Homo sapiens
QQYNSYPRT

SEQ ID NO: 14829 - protein, 8 aa, Homo sapiens
QQYNSYPT

SEQ ID NO: 14830 - protein, 9 aa, Homo sapiens
QQYNSYPVT

SEQ ID NO: 14831 - protein, 9 aa, Homo sapiens
QQYNSYPWT

SEQ ID NO: 14832 - protein, 9 aa, Homo sapiens
QQYNSYPYS

SEQ ID NO: 14833 - protein, 9 aa, Homo sapiens
QQYNSYPYT

SEQ ID NO: 14834 - protein, 10 aa, Homo sapiens
QQYNSYRMYT

SEQ ID NO: 14835 - protein, 9 aa, Homo sapiens
QQYNSYSGT

SEQ ID NO: 14836 - protein, 9 aa, Homo sapiens
QQYNSYSIT

SEQ ID NO: 14837 - protein, 10 aa, Homo sapiens
QQYNSYSLWT

SEQ ID NO: 14838 - protein, 9 aa, Homo sapiens
QQYNSYSPT

SEQ ID NO: 14839 - protein, 10 aa, Homo sapiens
QQYNSYSPWT

SEQ ID NO: 14840 - protein, 10 aa, Homo sapiens
QQYNSYSPYT

SEQ ID NO: 14841 - protein, 11 aa, Homo sapiens
QQYNSYSSPLT

SEQ ID NO: 14842 - protein, 10 aa, Homo sapiens
QQYNSYSSYT

SEQ ID NO: 14843 - protein, 10 aa, Homo sapiens
QQYNSYSSYT

SEQ ID NO: 14844 - protein, 8 aa, Homo sapiens
QQYNSYST

SEQ ID NO: 14845 - protein, 9 aa, Homo sapiens
QQYNSYSWT

SEQ ID NO: 14846 - protein, 9 aa, Homo sapiens
QQYNSYSYT

SEQ ID NO: 14847 - protein, 9 aa, Homo sapiens
QQYNSYTIS

SEQ ID NO: 14848 - protein, 9 aa, Homo sapiens
QQYNSYWIT

SEQ ID NO: 14849 - protein, 8 aa, Homo sapiens
QQYNSYYT

SEQ ID NO: 14850 - protein, 9 aa, Homo sapiens
QQYNTFPPT

SEQ ID NO: 14851 - protein, 9 aa, Homo sapiens
QQYNTSPLT

SEQ ID NO: 14852 - protein, 10 aa, Homo sapiens
QQYNTWPPLT

SEQ ID NO: 14853 - protein, 8 aa, Homo sapiens
QQYNTYSA

SEQ ID NO: 14854 - protein, 9 aa, Homo sapiens
QQYNTYYIT

SEQ ID NO: 14855 - protein, 9 aa, Homo sapiens
QQYNYWPLT

SEQ ID NO: 14856 - protein, 10 aa, Homo sapiens
QQYNYWPPWT

SEQ ID NO: 14857 - protein, 10 aa, Homo sapiens
QQYNYWPPYT

SEQ ID NO: 14858 - protein, 9 aa, Homo sapiens
QQYNYYSWT

SEQ ID NO: 14859 - protein, 9 aa, Homo sapiens
QQYQMYPVT

SEQ ID NO: 14860 - protein, 9 aa, Homo sapiens
QQYQRYSWT

SEQ ID NO: 14861 - protein, 9 aa, Homo sapiens
QQYQSYSWT

SEQ ID NO: 14862 - protein, 9 aa, Homo sapiens
QQYRSSPLT

SEQ ID NO: 14863 - protein, 5 aa, Homo sapiens
QQYRT

SEQ ID NO: 14864 - protein, 10 aa, Homo sapiens
QQYSFWPPWT

SEQ ID NO: 14865 - protein, 9 aa, Homo sapiens
QQYSGSPPT

SEQ ID NO: 14866 - protein, 11 aa, Homo sapiens
QQYSNWPPAYS

SEQ ID NO: 14867 - protein, 10 aa, Homo sapiens
QQYSNWPPIT

SEQ ID NO: 14868 - protein, 10 aa, Homo sapiens
QQYSNWPPLT

SEQ ID NO: 14869 - protein, 10 aa, Homo sapiens
QQYSNYPYVT

SEQ ID NO: 14870 - protein, 10 aa, Homo sapiens
QQYSSSPMYT

SEQ ID NO: 14871 - protein, 9 aa, Homo sapiens
QQYSSSSLT

SEQ ID NO: 14872 - protein, 9 aa, Homo sapiens
QQYSSSTYS

SEQ ID NO: 14873 - protein, 9 aa, Homo sapiens
QQYSSYLGT

SEQ ID NO: 14874 - protein, 9 aa, Homo sapiens
QQYSSYPGT

SEQ ID NO: 14875 - protein, 9 aa, Homo sapiens
QQYSSYPIT

SEQ ID NO: 14876 - protein, 11 aa, Homo sapiens
QQYSSYSGAIT

SEQ ID NO: 14877 - protein, 9 aa, Homo sapiens
QQYSSYSGT

SEQ ID NO: 14878 - protein, 9 aa, Homo sapiens
QQYSSYSWT

SEQ ID NO: 14879 - protein, 9 aa, Homo sapiens
QQYSTSILT

SEQ ID NO: 14880 - protein, 10 aa, Homo sapiens
QQYSTYARYT

SEQ ID NO: 14881 - protein, 9 aa, Homo sapiens
QQYSTYPYS

SEQ ID NO: 14882 - protein, 10 aa, Homo sapiens
QQYSTYSMFT

SEQ ID NO: 14883 - protein, 10 aa, Homo sapiens
QQYSTYSQVT

SEQ ID NO: 14884 - protein, 11 aa, Homo sapiens
QQYSVSLSKYT

SEQ ID NO: 14885 - protein, 10 aa, Homo sapiens
QQYTDWPPWT

SEQ ID NO: 14886 - protein, 10 aa, Homo sapiens
QQYTFWPPWT

SEQ ID NO: 14887 - protein, 10 aa, Homo sapiens
QQYTNWPPIT

SEQ ID NO: 14888 - protein, 10 aa, Homo sapiens
QQYTSFSPWT

SEQ ID NO: 14889 - protein, 9 aa, Homo sapiens
QQYTSYPWT

SEQ ID NO: 14890 - protein, 9 aa, Homo sapiens
QQYTTYSQT

SEQ ID NO: 14891 - protein, 10 aa, Homo sapiens
QQYTYWPPWT

SEQ ID NO: 14892 - protein, 9 aa, Homo sapiens
QQYVSSPIT

SEQ ID NO: 14893 - protein, 9 aa, Homo sapiens
QQYYAFPLT

SEQ ID NO: 14894 - protein, 9 aa, Homo sapiens
QQYYATPGT

SEQ ID NO: 14895 - protein, 9 aa, Homo sapiens
QQYYATPLT

SEQ ID NO: 14896 - protein, 9 aa, Homo sapiens
QQYYATPWT

SEQ ID NO: 14897 - protein, 9 aa, Homo sapiens
QQYYATPYT

SEQ ID NO: 14898 - protein, 9 aa, Homo sapiens
QQYYAYPFT

SEQ ID NO: 14899 - protein, 9 aa, Homo sapiens
QQYYDAAFT

SEQ ID NO: 14900 - protein, 9 aa, Homo sapiens
QQYYDDAFT

SEQ ID NO: 14901 - protein, 9 aa, Homo sapiens
QQYYDDRYT

SEQ ID NO: 14902 - protein, 9 aa, Homo sapiens
QQYYDIPFT

SEQ ID NO: 14903 - protein, 9 aa, Homo sapiens
QQYYDIPIT

SEQ ID NO: 14904 - protein, 9 aa, Homo sapiens
QQYYDIPLT

SEQ ID NO: 14905 - protein, 9 aa, Homo sapiens
QQYYDIPYT

SEQ ID NO: 14906 - protein, 8 aa, Homo sapiens
QQYYDKPT

SEQ ID NO: 14907 - protein, 9 aa, Homo sapiens
QQYYDLPLT

SEQ ID NO: 14908 - protein, 9 aa, Homo sapiens
QQYYDNTFT

SEQ ID NO: 14909 - protein, 9 aa, Homo sapiens
QQYYDRPWT

SEQ ID NO: 14910 - protein, 9 aa, Homo sapiens
QQYYDSPLA

SEQ ID NO: 14911 - protein, 9 aa, Homo sapiens
QQYYDTPFT

SEQ ID NO: 14912 - protein, 9 aa, Homo sapiens
QQYYDTPIT

SEQ ID NO: 14913 - protein, 9 aa, Homo sapiens
QQYYDTPPT

SEQ ID NO: 14914 - protein, 9 aa, Homo sapiens
QQYYDTPRT

SEQ ID NO: 14915 - protein, 8 aa, Homo sapiens
QQYYDTPS

SEQ ID NO: 14916 - protein, 9 aa, Homo sapiens
QQYYDTPST

SEQ ID NO: 14917 - protein, 9 aa, Homo sapiens
QQYYDTPVT

SEQ ID NO: 14918 - protein, 9 aa, Homo sapiens
QQYYDYPLT

SEQ ID NO: 14919 - protein, 9 aa, Homo sapiens
QQYYETPVT

SEQ ID NO: 14920 - protein, 9 aa, Homo sapiens
QQYYEYPFT

SEQ ID NO: 14921 - protein, 9 aa, Homo sapiens
QQYYGFPFT

SEQ ID NO: 14922 - protein, 9 aa, Homo sapiens
QQYYGGPIT

SEQ ID NO: 14923 - protein, 9 aa, Homo sapiens
QQYYGHPFT

SEQ ID NO: 14924 - protein, 9 aa, Homo sapiens
QQYYGIPIT

SEQ ID NO: 14925 - protein, 9 aa, Homo sapiens
QQYYGIPLT

SEQ ID NO: 14926 - protein, 9 aa, Homo sapiens
QQYYGLPLT

SEQ ID NO: 14927 - protein, 9 aa, Homo sapiens
QQYYGNPHT

SEQ ID NO: 14928 - protein, 9 aa, Homo sapiens
QQYYGNPQT

SEQ ID NO: 14929 - protein, 9 aa, Homo sapiens
QQYYGSPHT

SEQ ID NO: 14930 - protein, 9 aa, Homo sapiens
QQYYGSPYT

SEQ ID NO: 14931 - protein, 9 aa, Homo sapiens
QQYYGTPFT

SEQ ID NO: 14932 - protein, 9 aa, Homo sapiens
QQYYGTPHT

SEQ ID NO: 14933 - protein, 9 aa, Homo sapiens
QQYYGTPWT

SEQ ID NO: 14934 - protein, 9 aa, Homo sapiens
QQYYGVPHT

SEQ ID NO: 14935 - protein, 9 aa, Homo sapiens
QQYYGYPFT

SEQ ID NO: 14936 - protein, 9 aa, Homo sapiens
QQYYGYPLT

SEQ ID NO: 14937 - protein, 9 aa, Homo sapiens
QQYYHTPFT

SEQ ID NO: 14938 - protein, 9 aa, Homo sapiens
QQYYIGPPT

SEQ ID NO: 14939 - protein, 9 aa, Homo sapiens
QQYYISNLS

SEQ ID NO: 14940 - protein, 9 aa, Homo sapiens
QQYYNIPLS

SEQ ID NO: 14941 - protein, 9 aa, Homo sapiens
QQYYNIPLT

SEQ ID NO: 14942 - protein, 9 aa, Homo sapiens
QQYYNIPPA

SEQ ID NO: 14943 - protein, 10 aa, Homo sapiens
QQYYNPGALT

SEQ ID NO: 14944 - protein, 10 aa, Homo sapiens
QQYYNTPPST

SEQ ID NO: 14945 - protein, 9 aa, Homo sapiens
QQYYNTPRT

SEQ ID NO: 14946 - protein, 10 aa, Homo sapiens
QQYYNWPPIT

SEQ ID NO: 14947 - protein, 10 aa, Homo sapiens
QQYYNWPPLT

SEQ ID NO: 14948 - protein, 9 aa, Homo sapiens
QQYYNWPPT

SEQ ID NO: 14949 - protein, 9 aa, Homo sapiens
QQYYNYPLT

SEQ ID NO: 14950 - protein, 9 aa, Homo sapiens
QQYYRYPYT

SEQ ID NO: 14951 - protein, 9 aa, Homo sapiens
QQYYSAPFT

SEQ ID NO: 14952 - protein, 9 aa, Homo sapiens
QQYYSAPLT

SEQ ID NO: 14953 - protein, 9 aa, Homo sapiens
QQYYSDHFT

SEQ ID NO: 14954 - protein, 9 aa, Homo sapiens
QQYYSDPPD

SEQ ID NO: 14955 - protein, 9 aa, Homo sapiens
QQYYSDTFT

SEQ ID NO: 14956 - protein, 9 aa, Homo sapiens
QQYYSDVFT

SEQ ID NO: 14957 - protein, 9 aa, Homo sapiens
QQYYSFPLT

SEQ ID NO: 14958 - protein, 9 aa, Homo sapiens
QQYYSFPYT

SEQ ID NO: 14959 - protein, 9 aa, Homo sapiens
QQYYSIPLT

SEQ ID NO: 14960 - protein, 9 aa, Homo sapiens
QQYYSIPPT

SEQ ID NO: 14961 - protein, 8 aa, Homo sapiens
QQYYSIPT

SEQ ID NO: 14962 - protein, 9 aa, Homo sapiens
QQYYSIPYT

SEQ ID NO: 14963 - protein, 9 aa, Homo sapiens
QQYYSKPLT

SEQ ID NO: 14964 - protein, 9 aa, Homo sapiens
QQYYSLPLS

SEQ ID NO: 14965 - protein, 9 aa, Homo sapiens
QQYYSNPPT

SEQ ID NO: 14966 - protein, 9 aa, Homo sapiens
QQYYSNTWT

SEQ ID NO: 14967 - protein, 10 aa, Homo sapiens
QQYYSPPPFT

SEQ ID NO: 14968 - protein, 9 aa, Homo sapiens
QQYYSSPLT

SEQ ID NO: 14969 - protein, 10 aa, Homo sapiens
QQYYSTLAAT

SEQ ID NO: 14970 - protein, 10 aa, Homo sapiens
QQYYSTLSAT

SEQ ID NO: 14971 - protein, 10 aa, Homo sapiens
QQYYSTLVFT

SEQ ID NO: 14972 - protein, 9 aa, Homo sapiens
QQYYSTPFT

SEQ ID NO: 14973 - protein, 9 aa, Homo sapiens
QQYYSTPIT

SEQ ID NO: 14974 - protein, 10 aa, Homo sapiens
QQYYSTPLFT

SEQ ID NO: 14975 - protein, 9 aa, Homo sapiens
QQYYSTPLT

SEQ ID NO: 14976 - protein, 10 aa, Homo sapiens
QQYYSTPLYT

SEQ ID NO: 14977 - protein, 9 aa, Homo sapiens
QQYYSTPPF

SEQ ID NO: 14978 - protein, 10 aa, Homo sapiens
QQYYSTPPHT

SEQ ID NO: 14979 - protein, 11 aa, Homo sapiens
QQYYSTPPMYT

SEQ ID NO: 14980 - protein, 9 aa, Homo sapiens
QQYYSTPPT

SEQ ID NO: 14981 - protein, 10 aa, Homo sapiens
QQYYSTPPVT

SEQ ID NO: 14982 - protein, 10 aa, Homo sapiens
QQYYSTPPWT

SEQ ID NO: 14983 - protein, 11 aa, Homo sapiens
QQYYSTPQRYT

SEQ ID NO: 14984 - protein, 9 aa, Homo sapiens
QQYYSTPQT

SEQ ID NO: 14985 - protein, 9 aa, Homo sapiens
QQYYSTPRT

SEQ ID NO: 14986 - protein, 8 aa, Homo sapiens
QQYYSTPS

SEQ ID NO: 14987 - protein, 9 aa, Homo sapiens
QQYYSTPST

SEQ ID NO: 14988 - protein, 10 aa, Homo sapiens
QQYYSTPSWT

SEQ ID NO: 14989 - protein, 8 aa, Homo sapiens
QQYYSTPT

SEQ ID NO: 14990 - protein, 10 aa, Homo sapiens
QQYYSTPTWT

SEQ ID NO: 14991 - protein, 8 aa, Homo sapiens
QQYYSTPV

SEQ ID NO: 14992 - protein, 9 aa, Homo sapiens
QQYYSTPWT

SEQ ID NO: 14993 - protein, 9 aa, Homo sapiens
QQYYSTPYS

SEQ ID NO: 14994 - protein, 9 aa, Homo sapiens
QQYYSTPYT

SEQ ID NO: 14995 - protein, 10 aa, Homo sapiens
QQYYSTRMYT

SEQ ID NO: 14996 - protein, 9 aa, Homo sapiens
QQYYSTSQT

SEQ ID NO: 14997 - protein, 10 aa, Homo sapiens
QQYYSTYLYT

SEQ ID NO: 14998 - protein, 9 aa, Homo sapiens
QQYYSWPRS

SEQ ID NO: 14999 - protein, 8 aa, Homo sapiens
QQYYSWSS

SEQ ID NO: 15000 - protein, 11 aa, Homo sapiens
QQYYSYLRQWT

SEQ ID NO: 15001 - protein, 8 aa, Homo sapiens
QQYYSYLT

SEQ ID NO: 15002 - protein, 9 aa, Homo sapiens
QQYYSYPHT

SEQ ID NO: 15003 - protein, 10 aa, Homo sapiens
QQYYSYPMYT

SEQ ID NO: 15004 - protein, 10 aa, Homo sapiens
QQYYSYPPLT

SEQ ID NO: 15005 - protein, 9 aa, Homo sapiens
QQYYSYPRT

SEQ ID NO: 15006 - protein, 9 aa, Homo sapiens
QQYYSYPYT

SEQ ID NO: 15007 - protein, 9 aa, Homo sapiens
QQYYTDVRT

SEQ ID NO: 15008 - protein, 9 aa, Homo sapiens
QQYYTMPYT

SEQ ID NO: 15009 - protein, 9 aa, Homo sapiens
QQYYTTPFT

SEQ ID NO: 15010 - protein, 9 aa, Homo sapiens
QQYYTTPWT

SEQ ID NO: 15011 - protein, 9 aa, Homo sapiens
QQYYTTPYT

SEQ ID NO: 15012 - protein, 9 aa, Homo sapiens
QQYYTYSYT

SEQ ID NO: 15013 - protein, 9 aa, Homo sapiens
QQYYYLPLT

SEQ ID NO: 15014 - protein, 14 aa, Homo sapiens
QRAIGAAGTGHFES

SEQ ID NO: 15015 - protein, 15 aa, Homo sapiens
QRLRANYYYYYGMDV

SEQ ID NO: 15016 - protein, 9 aa, Homo sapiens
QRYGNSPET

SEQ ID NO: 15017 - protein, 9 aa, Homo sapiens
QRYNSAPAT

SEQ ID NO: 15018 - protein, 9 aa, Homo sapiens
QRYNSYPLG

SEQ ID NO: 15019 - protein, 10 aa, Homo sapiens
QRYNSYSLFT

SEQ ID NO: 15020 - protein, 12 aa, Homo sapiens
QSADSSATYAWV

SEQ ID NO: 15021 - protein, 12 aa, Homo sapiens
QSADSSATYAWV

SEQ ID NO: 15022 - protein, 11 aa, Homo sapiens
QSADSSDSFVL

SEQ ID NO: 15023 - protein, 10 aa, Homo sapiens
QSADSSGSYV

SEQ ID NO: 15024 - protein, 11 aa, Homo sapiens
QSADSSGSYVV

SEQ ID NO: 15025 - protein, 11 aa, Homo sapiens
QSADSSGTHGV

SEQ ID NO: 15026 - protein, 10 aa, Homo sapiens
QSADSSGTLV

SEQ ID NO: 15027 - protein, 10 aa, Homo sapiens
QSADSSGTRV

SEQ ID NO: 15028 - protein, 11 aa, Homo sapiens
QSADSSGTSVV

SEQ ID NO: 15029 - protein, 10 aa, Homo sapiens
QSADSSGTWV

SEQ ID NO: 15030 - protein, 12 aa, Homo sapiens
QSADSSGTYPVV

SEQ ID NO: 15031 - protein, 11 aa, Homo sapiens
QSADSSGTYVV

SEQ ID NO: 15032 - protein, 9 aa, Homo sapiens
QSADSSGWV

SEQ ID NO: 15033 - protein, 13 aa, Homo sapiens
QSADTIDSYWGAV

SEQ ID NO: 15034 - protein, 11 aa, Homo sapiens
QSADTSGTYRV

SEQ ID NO: 15035 - protein, 12 aa, Homo sapiens
QSADTTTSYGGV

SEQ ID NO: 15036 - protein, 98 aa, Homo sapiens; identical to SEQ ID NO: 13036

SEQ ID NO: 15037 - protein, 110 aa, Homo sapiens; identical to SEQ ID NO: 13037

SEQ ID NO: 15038 - protein, 97 aa, Homo sapiens; identical to SEQ ID NO: 13038

SEQ ID NO: 15039 - protein, 109 aa, Homo sapiens; identical to SEQ ID NO: 13039

SEQ ID NO: 15040 - protein, 98 aa, Homo sapiens; identical to SEQ ID NO: 13040

SEQ ID NO: 15041 - protein, 112 aa, Homo sapiens; identical to SEQ ID NO: 13041

SEQ ID NO: 15042 - protein, 96 aa, Homo sapiens; identical to SEQ ID NO: 13042

SEQ ID NO: 15043 - protein, 109 aa, Homo sapiens; identical to SEQ ID NO: 13043

SEQ ID NO: 15044 - protein, 96 aa, Homo sapiens; identical to SEQ ID NO: 13044

SEQ ID NO: 15045 - protein, 109 aa, Homo sapiens; identical to SEQ ID NO: 13045

SEQ ID NO: 15046 - protein, 96 aa, Homo sapiens; identical to SEQ ID NO: 13046

SEQ ID NO: 15047 - protein, 109 aa, Homo sapiens; identical to SEQ ID NO: 13047

SEQ ID NO: 15048 - protein, 97 aa, Homo sapiens; identical to SEQ ID NO: 13048

SEQ ID NO: 15049 - protein, 109 aa, Homo sapiens; identical to SEQ ID NO: 13049

SEQ ID NO: 15050 - protein, 95 aa, Homo sapiens; identical to SEQ ID NO: 13050

SEQ ID NO: 15051 - protein, 109 aa, Homo sapiens; identical to SEQ ID NO: 13051

SEQ ID NO: 15052 - protein, 99 aa, Homo sapiens; identical to SEQ ID NO: 13052

SEQ ID NO: 15053 - protein, 111 aa, Homo sapiens; identical to SEQ ID NO: 13053

SEQ ID NO: 15054 - protein, 98 aa, Homo sapiens; identical to SEQ ID NO: 13054

SEQ ID NO: 15055 - protein, 110 aa, Homo sapiens; identical to SEQ ID NO: 13055

SEQ ID NO: 15056 - protein, 95 aa, Homo sapiens; identical to SEQ ID NO: 13056

SEQ ID NO: 15057 - protein, 114 aa, Homo sapiens; identical to SEQ ID NO: 13057

SEQ ID NO: 15058 - protein, 98 aa, Homo sapiens; identical to SEQ ID NO: 13058

SEQ ID NO: 15059 - protein, 110 aa, Homo sapiens; identical to SEQ ID NO: 13059

SEQ ID NO: 15060 - protein, 99 aa, Homo sapiens; identical to SEQ ID NO: 13060

SEQ ID NO: 15061 - protein, 112 aa, Homo sapiens; identical to SEQ ID NO: 13061

SEQ ID NO: 15062 - protein, 99 aa, Homo sapiens; identical to SEQ ID NO: 13062

SEQ ID NO: 15063 - protein, 111 aa, Homo sapiens; identical to SEQ ID NO: 13063

SEQ ID NO: 15064 - protein, 96 aa, Homo sapiens; identical to SEQ ID NO: 13064

SEQ ID NO: 15065 - protein, 111 aa, Homo sapiens; identical to SEQ ID NO: 13065

SEQ ID NO: 15066 - protein, 96 aa, Homo sapiens; identical to SEQ ID NO: 13066

SEQ ID NO: 15067 - protein, 109 aa, Homo sapiens; identical to SEQ ID NO: 13067

SEQ ID NO: 15068 - protein, 95 aa, Homo sapiens; identical to SEQ ID NO: 13068

SEQ ID NO: 15069 - protein, 109 aa, Homo sapiens; identical to SEQ ID NO: 13069

SEQ ID NO: 15070 - protein, 98 aa, Homo sapiens; identical to SEQ ID NO: 13070

SEQ ID NO: 15071 - protein, 110 aa, Homo sapiens; identical to SEQ ID NO: 13071

SEQ ID NO: 15072 - protein, 98 aa, Homo sapiens; identical to SEQ ID NO: 13072

SEQ ID NO: 15073 - protein, 110 aa, Homo sapiens; identical to SEQ ID NO: 13073

SEQ ID NO: 15074 - protein, 98 aa, Homo sapiens; identical to SEQ ID NO: 13074

SEQ ID NO: 15075 - protein, 110 aa, Homo sapiens; identical to SEQ ID NO: 13075

SEQ ID NO: 15076 - protein, 98 aa, Homo sapiens; identical to SEQ ID NO: 13076

SEQ ID NO: 15077 - protein, 110 aa, Homo sapiens; identical to SEQ ID NO: 13077

SEQ ID NO: 15078 - protein, 99 aa, Homo sapiens; identical to SEQ ID NO: 13078

SEQ ID NO: 15079 - protein, 111 aa, Homo sapiens; identical to SEQ ID NO: 13079

SEQ ID NO: 15080 - protein, 98 aa, Homo sapiens; identical to SEQ ID NO: 13080

SEQ ID NO: 15081 - protein, 110 aa, Homo sapiens; identical to SEQ ID NO: 13081

SEQ ID NO: 15082 - protein, 99 aa, Homo sapiens; identical to SEQ ID NO: 13082

SEQ ID NO: 15083 - protein, 110 aa, Homo sapiens; identical to SEQ ID NO: 13083

SEQ ID NO: 15084 - protein, 95 aa, Homo sapiens; identical to SEQ ID NO: 13084

SEQ ID NO: 15085 - protein, 108 aa, Homo sapiens; identical to SEQ ID NO: 13085

SEQ ID NO: 15086 - protein, 96 aa, Homo sapiens; identical to SEQ ID NO: 13086

SEQ ID NO: 15087 - protein, 111 aa, Homo sapiens; identical to SEQ ID NO: 13087

SEQ ID NO: 15088 - protein, 98 aa, Homo sapiens; identical to SEQ ID NO: 13088

SEQ ID NO: 15089 - protein, 110 aa, Homo sapiens; identical to SEQ ID NO: 13089

SEQ ID NO: 15090 - protein, 98 aa, Homo sapiens; identical to SEQ ID NO: 13090

SEQ ID NO: 15091 - protein, 110 aa, Homo sapiens; identical to SEQ ID NO: 13091

SEQ ID NO: 15092 - protein, 98 aa, Homo sapiens; identical to SEQ ID NO: 13092

SEQ ID NO: 15093 - protein, 111 aa, Homo sapiens; identical to SEQ ID NO: 13093

SEQ ID NO: 15094 - protein, 98 aa, Homo sapiens; identical to SEQ ID NO: 13094

SEQ ID NO: 15095 - protein, 110 aa, Homo sapiens; identical to SEQ ID NO: 13095

SEQ ID NO: 15096 - protein, 99 aa, Homo sapiens; identical to SEQ ID NO: 13096

SEQ ID NO: 15097 - protein, 111 aa, Homo sapiens; identical to SEQ ID NO: 13097

SEQ ID NO: 15098 - protein, 97 aa, Homo sapiens; identical to SEQ ID NO: 13098

SEQ ID NO: 15099 - protein, 110 aa, Homo sapiens; identical to SEQ ID NO: 13099

SEQ ID NO: 15100 - protein, 98 aa, Homo sapiens; identical to SEQ ID NO: 13100

SEQ ID NO: 15101 - protein, 112 aa, Homo sapiens; identical to SEQ ID NO: 13101

SEQ ID NO: 15102 - protein, 98 aa, Homo sapiens; identical to SEQ ID NO: 13102

SEQ ID NO: 15103 - protein, 110 aa, Homo sapiens; identical to SEQ ID NO: 13103

SEQ ID NO: 15104 - protein, 98 aa, Homo sapiens; identical to SEQ ID NO: 13104

SEQ ID NO: 15105 - protein, 110 aa, Homo sapiens; identical to SEQ ID NO: 13105

SEQ ID NO: 15106 - protein, 95 aa, Homo sapiens; identical to SEQ ID NO: 13106

SEQ ID NO: 15107 - protein, 111 aa, Homo sapiens; identical to SEQ ID NO: 13107

SEQ ID NO: 15108 - protein, 98 aa, Homo sapiens; identical to SEQ ID NO: 13108

SEQ ID NO: 15109 - protein, 110 aa, Homo sapiens; identical to SEQ ID NO: 13109

SEQ ID NO: 15110 - protein, 96 aa, Homo sapiens; identical to SEQ ID NO: 13110

SEQ ID NO: 15111 - protein, 109 aa, Homo sapiens; identical to SEQ ID NO: 13111

SEQ ID NO: 15112 - protein, 98 aa, Homo sapiens; identical to SEQ ID NO: 13112

SEQ ID NO: 15113 - protein, 111 aa, Homo sapiens; identical to SEQ ID NO: 13113

SEQ ID NO: 15114 - protein, 98 aa, Homo sapiens; identical to SEQ ID NO: 13114

SEQ ID NO: 15115 - protein, 110 aa, Homo sapiens; identical to SEQ ID NO: 13115

SEQ ID NO: 15116 - protein, 98 aa, Homo sapiens; identical to SEQ ID NO: 13116

SEQ ID NO: 15117 - protein, 98 aa, Homo sapiens; identical to SEQ ID NO: 13116

SEQ ID NO: 15118 - protein, 110 aa, Homo sapiens; identical to SEQ ID NO: 13118

SEQ ID NO: 15119 - protein, 110 aa, Homo sapiens; identical to SEQ ID NO: 13119

SEQ ID NO: 15120 - protein, 97 aa, Homo sapiens; identical to SEQ ID NO: 13120

SEQ ID NO: 15121 - protein, 110 aa, Homo sapiens; identical to SEQ ID NO: 13121

SEQ ID NO: 15122 - protein, 98 aa, Homo sapiens; identical to SEQ ID NO: 13122

SEQ ID NO: 15123 - protein, 110 aa, Homo sapiens; identical to SEQ ID NO: 13123

SEQ ID NO: 15124 - protein, 110 aa, Homo sapiens; identical to SEQ ID NO: 13124

SEQ ID NO: 15125 - protein, 110 aa, Homo sapiens; identical to SEQ ID NO: 13125

SEQ ID NO: 15126 - protein, 98 aa, Homo sapiens; identical to SEQ ID NO: 13126

SEQ ID NO: 15127 - protein, 99 aa, Homo sapiens; identical to SEQ ID NO: 13127

SEQ ID NO: 15128 - protein, 110 aa, Homo sapiens; identical to SEQ ID NO: 13128

SEQ ID NO: 15129 - protein, 111 aa, Homo sapiens; identical to SEQ ID NO: 13129

SEQ ID NO: 15130 - protein, 112 aa, Homo sapiens; identical to SEQ ID NO: 13130

SEQ ID NO: 15131 - protein, 112 aa, Homo sapiens; identical to SEQ ID NO: 13131

SEQ ID NO: 15132 - protein, 110 aa, Homo sapiens; identical to SEQ ID NO: 13132

SEQ ID NO: 15133 - protein, 110 aa, Homo sapiens; identical to SEQ ID NO: 13133

SEQ ID NO: 15134 - protein, 111 aa, Homo sapiens; identical to SEQ ID NO: 13134

SEQ ID NO: 15135 - protein, 98 aa, Homo sapiens; identical to SEQ ID NO: 13135

SEQ ID NO: 15136 - protein, 110 aa, Homo sapiens; identical to SEQ ID NO: 13136

SEQ ID NO: 15137 - protein, 96 aa, Homo sapiens; identical to SEQ ID NO: 13137

SEQ ID NO: 15138 - protein, 110 aa, Homo sapiens; identical to SEQ ID NO: 13138

SEQ ID NO: 15139 - protein, 98 aa, Homo sapiens; identical to SEQ ID NO: 13139

SEQ ID NO: 15140 - protein, 110 aa, Homo sapiens; identical to SEQ ID NO: 13140

SEQ ID NO: 15141 - protein, 98 aa, Homo sapiens; identical to SEQ ID NO: 13141

SEQ ID NO: 15142 - protein, 99 aa, Homo sapiens; identical to SEQ ID NO: 13142

SEQ ID NO: 15143 - protein, 110 aa, Homo sapiens; identical to SEQ ID NO: 13143

SEQ ID NO: 15144 - protein, 110 aa, Homo sapiens; identical to SEQ ID NO: 13144

SEQ ID NO: 15145 - protein, 98 aa, Homo sapiens; identical to SEQ ID NO: 13145

SEQ ID NO: 15146 - protein, 110 aa, Homo sapiens; identical to SEQ ID NO: 13146

SEQ ID NO: 15147 - protein, 98 aa, Homo sapiens; identical to SEQ ID NO: 13147

SEQ ID NO: 15148 - protein, 110 aa, Homo sapiens; identical to SEQ ID NO: 13148

SEQ ID NO: 15149 - protein, 98 aa, Homo sapiens; identical to SEQ ID NO: 13149

SEQ ID NO: 15150 - protein, 110 aa, Homo sapiens; identical to SEQ ID NO: 13150

SEQ ID NO: 15151 - protein, 98 aa, Homo sapiens; identical to SEQ ID NO: 13151

SEQ ID NO: 15152 - protein, 110 aa, Homo sapiens; identical to SEQ ID NO: 13152

SEQ ID NO: 15153 - protein, 98 aa, Homo sapiens; identical to SEQ ID NO: 13153

SEQ ID NO: 15154 - protein, 110 aa, Homo sapiens; identical to SEQ ID NO: 13154

SEQ ID NO: 15155 - protein, 98 aa, Homo sapiens; identical to SEQ ID NO: 13155

SEQ ID NO: 15156 - protein, 110 aa, Homo sapiens; identical to SEQ ID NO: 13156

SEQ ID NO: 15157 - protein, 96 aa, Homo sapiens; identical to SEQ ID NO: 13157

SEQ ID NO: 15158 - protein, 110 aa, Homo sapiens; identical to SEQ ID NO: 13158

SEQ ID NO: 15159 - protein, 98 aa, Homo sapiens; identical to SEQ ID NO: 13159

SEQ ID NO: 15160 - protein, 110 aa, Homo sapiens; identical to SEQ ID NO: 13160

SEQ ID NO: 15161 - protein, 98 aa, Homo sapiens; identical to SEQ ID NO: 13161

SEQ ID NO: 15162 - protein, 110 aa, Homo sapiens; identical to SEQ ID NO: 13162

SEQ ID NO: 15163 - protein, 98 aa, Homo sapiens; identical to SEQ ID NO: 13163

SEQ ID NO: 15164 - protein, 110 aa, Homo sapiens; identical to SEQ ID NO: 13164

SEQ ID NO: 15165 - protein, 98 aa, Homo sapiens; identical to SEQ ID NO: 13165

SEQ ID NO: 15166 - protein, 110 aa, Homo sapiens; identical to SEQ ID NO: 13166

SEQ ID NO: 15167 - protein, 98 aa, Homo sapiens; identical to SEQ ID NO: 13167

SEQ ID NO: 15168 - protein, 110 aa, Homo sapiens; identical to SEQ ID NO: 13168

SEQ ID NO: 15169 - protein, 98 aa, Homo sapiens; identical to SEQ ID NO: 13169

SEQ ID NO: 15170 - protein, 111 aa, Homo sapiens; identical to SEQ ID NO: 13170

SEQ ID NO: 15171 - protein, 99 aa, Homo sapiens; identical to SEQ ID NO: 13171

SEQ ID NO: 15172 - protein, 114 aa, Homo sapiens; identical to SEQ ID NO: 13172

SEQ ID NO: 15173 - protein, 98 aa, Homo sapiens; identical to SEQ ID NO: 13173

SEQ ID NO: 15174 - protein, 111 aa, Homo sapiens; identical to SEQ ID NO: 13174

SEQ ID NO: 15175 - protein, 96 aa, Homo sapiens; identical to SEQ ID NO: 13175

SEQ ID NO: 15176 - protein, 108 aa, Homo sapiens; identical to SEQ ID NO: 13176

SEQ ID NO: 15177 - protein, 98 aa, Homo sapiens; identical to SEQ ID NO: 13177

SEQ ID NO: 15178 - protein, 110 aa, Homo sapiens; identical to SEQ ID NO: 13178

SEQ ID NO: 15179 - protein, 96 aa, Homo sapiens; identical to SEQ ID NO: 13179

SEQ ID NO: 15180 - protein, 109 aa, Homo sapiens; identical to SEQ ID NO: 13180

SEQ ID NO: 15181 - protein, 99 aa, Homo sapiens; identical to SEQ ID NO: 13181

SEQ ID NO: 15182 - protein, 112 aa, Homo sapiens; identical to SEQ ID NO: 13182

SEQ ID NO: 15183 - protein, 98 aa, Homo sapiens; identical to SEQ ID NO: 13183

SEQ ID NO: 15184 - protein, 110 aa, Homo sapiens; identical to SEQ ID NO: 13184

SEQ ID NO: 15185 - protein, 98 aa, Homo sapiens; identical to SEQ ID NO: 13185

SEQ ID NO: 15186 - protein, 110 aa, Homo sapiens; identical to SEQ ID NO: 13186

SEQ ID NO: 15187 - protein, 98 aa, Homo sapiens; identical to SEQ ID NO: 13187

SEQ ID NO: 15188 - protein, 110 aa, Homo sapiens; identical to SEQ ID NO: 13188

SEQ ID NO: 15189 - protein, 98 aa, Homo sapiens; identical to SEQ ID NO: 13189

SEQ ID NO: 15190 - protein, 110 aa, Homo sapiens; identical to SEQ ID NO: 13190

SEQ ID NO: 15191 - protein, 97 aa, Homo sapiens; identical to SEQ ID NO: 13191

SEQ ID NO: 15192 - protein, 111 aa, Homo sapiens; identical to SEQ ID NO: 13192

SEQ ID NO: 15193 - protein, 97 aa, Homo sapiens; identical to SEQ ID NO: 13193

SEQ ID NO: 15194 - protein, 110 aa, Homo sapiens; identical to SEQ ID NO: 13194

SEQ ID NO: 15195 - protein, 95 aa, Homo sapiens; identical to SEQ ID NO: 13195

SEQ ID NO: 15196 - protein, 111 aa, Homo sapiens; identical to SEQ ID NO: 13196

SEQ ID NO: 15197 - protein, 98 aa, Homo sapiens; identical to SEQ ID NO: 13197

SEQ ID NO: 15198 - protein, 111 aa, Homo sapiens; identical to SEQ ID NO: 13198

SEQ ID NO: 15199 - protein, 98 aa, Homo sapiens; identical to SEQ ID NO: 13199

SEQ ID NO: 15200 - protein, 111 aa, Homo sapiens; identical to SEQ ID NO: 13200

SEQ ID NO: 15201 - protein, 98 aa, Homo sapiens; identical to SEQ ID NO: 13201

SEQ ID NO: 15202 - protein, 110 aa, Homo sapiens; identical to SEQ ID NO: 13202

SEQ ID NO: 15203 - protein, 99 aa, Homo sapiens; identical to SEQ ID NO: 13203

SEQ ID NO: 15204 - protein, 111 aa, Homo sapiens; identical to SEQ ID NO: 13204

SEQ ID NO: 15205 - protein, 98 aa, Homo sapiens; identical to SEQ ID NO: 13205

SEQ ID NO: 15206 - protein, 110 aa, Homo sapiens; identical to SEQ ID NO: 13206

SEQ ID NO: 15207 - protein, 98 aa, Homo sapiens; identical to SEQ ID NO: 13207

SEQ ID NO: 15208 - protein, 110 aa, Homo sapiens; identical to SEQ ID NO: 13208

SEQ ID NO: 15209 - protein, 98 aa, Homo sapiens; identical to SEQ ID NO: 13209

SEQ ID NO: 15210 - protein, 110 aa, Homo sapiens; identical to SEQ ID NO: 13210

SEQ ID NO: 15211 - protein, 99 aa, Homo sapiens; identical to SEQ ID NO: 13211

SEQ ID NO: 15212 - protein, 111 aa, Homo sapiens; identical to SEQ ID NO: 13212

SEQ ID NO: 15213 - protein, 96 aa, Homo sapiens; identical to SEQ ID NO: 13213

SEQ ID NO: 15214 - protein, 112 aa, Homo sapiens; identical to SEQ ID NO: 13214

SEQ ID NO: 15215 - protein, 95 aa, Homo sapiens; identical to SEQ ID NO: 13215

SEQ ID NO: 15216 - protein, 109 aa, Homo sapiens; identical to SEQ ID NO: 13216

SEQ ID NO: 15217 - protein, 98 aa, Homo sapiens; identical to SEQ ID NO: 13217

SEQ ID NO: 15218 - protein, 110 aa, Homo sapiens; identical to SEQ ID NO: 13218

SEQ ID NO: 15219 - protein, 98 aa, Homo sapiens; identical to SEQ ID NO: 13219

SEQ ID NO: 15220 - protein, 110 aa, Homo sapiens; identical to SEQ ID NO: 13220

SEQ ID NO: 15221 - protein, 98 aa, Homo sapiens; identical to SEQ ID NO: 13221

SEQ ID NO: 15222 - protein, 109 aa, Homo sapiens; identical to SEQ ID NO: 13222

SEQ ID NO: 15223 - protein, 98 aa, Homo sapiens; identical to SEQ ID NO: 13223

SEQ ID NO: 15224 - protein, 110 aa, Homo sapiens; identical to SEQ ID NO: 13224

SEQ ID NO: 15225 - protein, 98 aa, Homo sapiens; identical to SEQ ID NO: 13225

SEQ ID NO: 15226 - protein, 110 aa, Homo sapiens; identical to SEQ ID NO: 13226

SEQ ID NO: 15227 - protein, 98 aa, Homo sapiens; identical to SEQ ID NO: 13227

SEQ ID NO: 15228 - protein, 110 aa, Homo sapiens; identical to SEQ ID NO: 13228

SEQ ID NO: 15229 - protein, 95 aa, Homo sapiens; identical to SEQ ID NO: 13229

SEQ ID NO: 15230 - protein, 110 aa, Homo sapiens; identical to SEQ ID NO: 13230

SEQ ID NO: 15231 - protein, 98 aa, Homo sapiens; identical to SEQ ID NO: 13231

SEQ ID NO: 15232 - protein, 110 aa, Homo sapiens; identical to SEQ ID NO: 13232

SEQ ID NO: 15233 - protein, 98 aa, Homo sapiens; identical to SEQ ID NO: 13233

SEQ ID NO: 15234 - protein, 111 aa, Homo sapiens; identical to SEQ ID NO: 13234

SEQ ID NO: 15235 - protein, 97 aa, Homo sapiens; identical to SEQ ID NO: 13235

SEQ ID NO: 15236 - protein, 110 aa, Homo sapiens; identical to SEQ ID NO: 13236

SEQ ID NO: 15237 - protein, 98 aa, Homo sapiens; identical to SEQ ID NO: 13237

SEQ ID NO: 15238 - protein, 110 aa, Homo sapiens; identical to SEQ ID NO: 13238

SEQ ID NO: 15239 - protein, 98 aa, Homo sapiens; identical to SEQ ID NO: 13239

SEQ ID NO: 15240 - protein, 110 aa, Homo sapiens; identical to SEQ ID NO: 13240

SEQ ID NO: 15241 - protein, 97 aa, Homo sapiens; identical to SEQ ID NO: 13241

SEQ ID NO: 15242 - protein, 110 aa, Homo sapiens; identical to SEQ ID NO: 13242

SEQ ID NO: 15243 - protein, 98 aa, Homo sapiens; identical to SEQ ID NO: 13243

SEQ ID NO: 15244 - protein, 110 aa, Homo sapiens; identical to SEQ ID NO: 13244

SEQ ID NO: 15245 - protein, 96 aa, Homo sapiens; identical to SEQ ID NO: 13245

SEQ ID NO: 15246 - protein, 110 aa, Homo sapiens; identical to SEQ ID NO: 13246

SEQ ID NO: 15247 - protein, 98 aa, Homo sapiens; identical to SEQ ID NO: 13247

SEQ ID NO: 15248 - protein, 110 aa, Homo sapiens; identical to SEQ ID NO: 13248

SEQ ID NO: 15249 - protein, 98 aa, Homo sapiens; identical to SEQ ID NO: 13249

SEQ ID NO: 15250 - protein, 110 aa, Homo sapiens; identical to SEQ ID NO: 13250

SEQ ID NO: 15251 - protein, 98 aa, Homo sapiens; identical to SEQ ID NO: 13251

SEQ ID NO: 15252 - protein, 112 aa, Homo sapiens; identical to SEQ ID NO: 13252

SEQ ID NO: 15253 - protein, 95 aa, Homo sapiens; identical to SEQ ID NO: 13253

SEQ ID NO: 15254 - protein, 109 aa, Homo sapiens; identical to SEQ ID NO: 13254

SEQ ID NO: 15255 - protein, 98 aa, Homo sapiens; identical to SEQ ID NO: 13255

SEQ ID NO: 15256 - protein, 110 aa, Homo sapiens; identical to SEQ ID NO: 13256

SEQ ID NO: 15257 - protein, 98 aa, Homo sapiens; identical to SEQ ID NO: 13257

SEQ ID NO: 15258 - protein, 110 aa, Homo sapiens; identical to SEQ ID NO: 13258

SEQ ID NO: 15259 - protein, 99 aa, Homo sapiens; identical to SEQ ID NO: 13259

SEQ ID NO: 15260 - protein, 113 aa, Homo sapiens; identical to SEQ ID NO: 13260

SEQ ID NO: 15261 - protein, 97 aa, Homo sapiens; identical to SEQ ID NO: 13261

SEQ ID NO: 15262 - protein, 111 aa, Homo sapiens; identical to SEQ ID NO: 13262

SEQ ID NO: 15263 - protein, 97 aa, Homo sapiens; identical to SEQ ID NO: 13263

SEQ ID NO: 15264 - protein, 111 aa, Homo sapiens; identical to SEQ ID NO: 13264

SEQ ID NO: 15265 - protein, 97 aa, Homo sapiens; identical to SEQ ID NO: 13265

SEQ ID NO: 15266 - protein, 111 aa, Homo sapiens; identical to SEQ ID NO: 13266

SEQ ID NO: 15267 - protein, 97 aa, Homo sapiens; identical to SEQ ID NO: 13267

SEQ ID NO: 15268 - protein, 110 aa, Homo sapiens; identical to SEQ ID NO: 13268

SEQ ID NO: 15269 - protein, 97 aa, Homo sapiens; identical to SEQ ID NO: 13269

SEQ ID NO: 15270 - protein, 110 aa, Homo sapiens; identical to SEQ ID NO: 13270

SEQ ID NO: 15271 - protein, 96 aa, Homo sapiens; identical to SEQ ID NO: 13271

SEQ ID NO: 15272 - protein, 110 aa, Homo sapiens; identical to SEQ ID NO: 13272

SEQ ID NO: 15273 - protein, 98 aa, Homo sapiens; identical to SEQ ID NO: 13273

SEQ ID NO: 15274 - protein, 110 aa, Homo sapiens; identical to SEQ ID NO: 13274

SEQ ID NO: 15275 - protein, 98 aa, Homo sapiens; identical to SEQ ID NO: 13275

SEQ ID NO: 15276 - protein, 110 aa, Homo sapiens; identical to SEQ ID NO: 13276

SEQ ID NO: 15277 - protein, 98 aa, Homo sapiens; identical to SEQ ID NO: 13277

SEQ ID NO: 15278 - protein, 111 aa, Homo sapiens; identical to SEQ ID NO: 13278

SEQ ID NO: 15279 - protein, 98 aa, Homo sapiens; identical to SEQ ID NO: 13279

SEQ ID NO: 15280 - protein, 111 aa, Homo sapiens; identical to SEQ ID NO: 13280

SEQ ID NO: 15281 - protein, 98 aa, Homo sapiens; identical to SEQ ID NO: 13281

SEQ ID NO: 15282 - protein, 110 aa, Homo sapiens; identical to SEQ ID NO: 13282

SEQ ID NO: 15283 - protein, 98 aa, Homo sapiens; identical to SEQ ID NO: 13283

SEQ ID NO: 15284 - protein, 110 aa, Homo sapiens; identical to SEQ ID NO: 13284

SEQ ID NO: 15285 - protein, 99 aa, Homo sapiens; identical to SEQ ID NO: 13285

SEQ ID NO: 15286 - protein, 110 aa, Homo sapiens; identical to SEQ ID NO: 13286

SEQ ID NO: 15287 - protein, 98 aa, Homo sapiens; identical to SEQ ID NO: 13287

SEQ ID NO: 15288 - protein, 110 aa, Homo sapiens; identical to SEQ ID NO: 13288

SEQ ID NO: 15289 - protein, 99 aa, Homo sapiens; identical to SEQ ID NO: 13289

SEQ ID NO: 15290 - protein, 110 aa, Homo sapiens; identical to SEQ ID NO: 13290

SEQ ID NO: 15291 - protein, 98 aa, Homo sapiens; identical to SEQ ID NO: 13291

SEQ ID NO: 15292 - protein, 112 aa, Homo sapiens; identical to SEQ ID NO: 13292

SEQ ID NO: 15293 - protein, 95 aa, Homo sapiens; identical to SEQ ID NO: 13293

SEQ ID NO: 15294 - protein, 109 aa, Homo sapiens; identical to SEQ ID NO: 13294

SEQ ID NO: 15295 - protein, 98 aa, Homo sapiens; identical to SEQ ID NO: 13295

SEQ ID NO: 15296 - protein, 110 aa, Homo sapiens; identical to SEQ ID NO: 13296

SEQ ID NO: 15297 - protein, 98 aa, Homo sapiens; identical to SEQ ID NO: 13297

SEQ ID NO: 15298 - protein, 110 aa, Homo sapiens; identical to SEQ ID NO: 13298

SEQ ID NO: 15299 - protein, 98 aa, Homo sapiens; identical to SEQ ID NO: 13299

SEQ ID NO: 15300 - protein, 110 aa, Homo sapiens; identical to SEQ ID NO: 13300

SEQ ID NO: 15301 - protein, 98 aa, Homo sapiens; identical to SEQ ID NO: 13301

SEQ ID NO: 15302 - protein, 110 aa, Homo sapiens; identical to SEQ ID NO: 13302

SEQ ID NO: 15303 - protein, 99 aa, Homo sapiens; identical to SEQ ID NO: 13303

SEQ ID NO: 15304 - protein, 111 aa, Homo sapiens; identical to SEQ ID NO: 13304

SEQ ID NO: 15305 - protein, 98 aa, Homo sapiens; identical to SEQ ID NO: 13305

SEQ ID NO: 15306 - protein, 99 aa, Homo sapiens; identical to SEQ ID NO: 13306

SEQ ID NO: 15307 - protein, 111 aa, Homo sapiens; identical to SEQ ID NO: 13307

SEQ ID NO: 15308 - protein, 110 aa, Homo sapiens; identical to SEQ ID NO: 13308

SEQ ID NO: 15309 - protein, 96 aa, Homo sapiens; identical to SEQ ID NO: 13309

SEQ ID NO: 15310 - protein, 111 aa, Homo sapiens; identical to SEQ ID NO: 13310

SEQ ID NO: 15311 - protein, 99 aa, Homo sapiens; identical to SEQ ID NO: 13311

SEQ ID NO: 15312 - protein, 110 aa, Homo sapiens; identical to SEQ ID NO: 13312

SEQ ID NO: 15313 - protein, 98 aa, Homo sapiens; identical to SEQ ID NO: 13313

SEQ ID NO: 15314 - protein, 110 aa, Homo sapiens; identical to SEQ ID NO: 13314

SEQ ID NO: 15315 - protein, 99 aa, Homo sapiens; identical to SEQ ID NO: 13315

SEQ ID NO: 15316 - protein, 110 aa, Homo sapiens; identical to SEQ ID NO: 13316

SEQ ID NO: 15317 - protein, 98 aa, Homo sapiens; identical to SEQ ID NO: 13317

SEQ ID NO: 15318 - protein, 110 aa, Homo sapiens; identical to SEQ ID NO: 13318

SEQ ID NO: 15319 - protein, 98 aa, Homo sapiens; identical to SEQ ID NO: 13319

SEQ ID NO: 15320 - protein, 110 aa, Homo sapiens; identical to SEQ ID NO: 13320

SEQ ID NO: 15321 - protein, 98 aa, Homo sapiens; identical to SEQ ID NO: 13321

SEQ ID NO: 15322 - protein, 110 aa, Homo sapiens; identical to SEQ ID NO: 13322

SEQ ID NO: 15323 - protein, 11 aa, Homo sapiens
QSHDSTLSAWV

SEQ ID NO: 15324 - protein, 99 aa, Homo sapiens; identical to SEQ ID NO: 13324

SEQ ID NO: 15325 - protein, 110 aa, Homo sapiens; identical to SEQ ID NO: 13325

SEQ ID NO: 15326 - protein, 10 aa, Homo sapiens
QSPGSDTLVV

SEQ ID NO: 15327 - protein, 12 aa, Homo sapiens
QSRDSSADHRWV

SEQ ID NO: 15328 - protein, 12 aa, Homo sapiens
QSRDSSDDHSWV

SEQ ID NO: 15329 - protein, 12 aa, Homo sapiens
QSRDSSVNYRWV

SEQ ID NO: 15330 - protein, 12 aa, Homo sapiens
QSRDSTLNYRWV

SEQ ID NO: 15331 - protein, 11 aa, Homo sapiens
QSSDTSGTIAV

SEQ ID NO: 15332 - protein, 10 aa, Homo sapiens
QSSGNSINWV

SEQ ID NO: 15333 - protein, 17 aa, Homo sapiens
QSSQSVLYSSNNKNYLA

SEQ ID NO: 15334 - protein, 11 aa, Homo sapiens
QSTDSSGTYVV

SEQ ID NO: 15335 - protein, 10 aa, Homo sapiens
QSTDSSGVYV

SEQ ID NO: 15336 - protein, 10 aa, Homo sapiens
QSTDTRGIVV

SEQ ID NO: 15337 - protein, 98 aa, Homo sapiens; identical to SEQ ID NO: 13337

SEQ ID NO: 15338 - protein, 110 aa, Homo sapiens; identical to SEQ ID NO: 13338

SEQ ID NO: 15339 - protein, 11 aa, Homo sapiens
QSTSAHSSGRV

SEQ ID NO: 15340 - protein, 97 aa, Homo sapiens; identical to SEQ ID NO: 13340

SEQ ID NO: 15341 - protein, 111 aa, Homo sapiens; identical to SEQ ID NO: 13341

SEQ ID NO: 15342 - protein, 101 aa, Homo sapiens; identical to SEQ ID NO: 13342

SEQ ID NO: 15343 - protein, 114 aa, Homo sapiens; identical to SEQ ID NO: 13343

SEQ ID NO: 15344 - protein, 97 aa, Homo sapiens; identical to SEQ ID NO: 13344

SEQ ID NO: 15345 - protein, 111 aa, Homo sapiens; identical to SEQ ID NO: 13345

SEQ ID NO: 15346 - protein, 98 aa, Homo sapiens; identical to SEQ ID NO: 13346

SEQ ID NO: 15347 - protein, 111 aa, Homo sapiens; identical to SEQ ID NO: 13347

SEQ ID NO: 15348 - protein, 98 aa, Homo sapiens; identical to SEQ ID NO: 13348

SEQ ID NO: 15349 - protein, 110 aa, Homo sapiens; identical to SEQ ID NO: 13349

SEQ ID NO: 15350 - protein, 98 aa, Homo sapiens; identical to SEQ ID NO: 13350

SEQ ID NO: 15351 - protein, 110 aa, Homo sapiens; identical to SEQ ID NO: 13351

SEQ ID NO: 15352 - protein, 98 aa, Homo sapiens; identical to SEQ ID NO: 13352

SEQ ID NO: 15353 - protein, 110 aa, Homo sapiens; identical to SEQ ID NO: 13353

SEQ ID NO: 15354 - protein, 97 aa, Homo sapiens; identical to SEQ ID NO: 13354

SEQ ID NO: 15355 - protein, 110 aa, Homo sapiens; identical to SEQ ID NO: 13355

SEQ ID NO: 15356 - protein, 99 aa, Homo sapiens; identical to SEQ ID NO: 13356

SEQ ID NO: 15357 - protein, 110 aa, Homo sapiens; identical to SEQ ID NO: 13357

SEQ ID NO: 15358 - protein, 98 aa, Homo sapiens; identical to SEQ ID NO: 13358

SEQ ID NO: 15359 - protein, 110 aa, Homo sapiens; identical to SEQ ID NO: 13359

SEQ ID NO: 15360 - protein, 99 aa, Homo sapiens; identical to SEQ ID NO: 13360

SEQ ID NO: 15361 - protein, 110 aa, Homo sapiens; identical to SEQ ID NO: 13361

SEQ ID NO: 15362 - protein, 97 aa, Homo sapiens; identical to SEQ ID NO: 13362

SEQ ID NO: 15363 - protein, 110 aa, Homo sapiens; identical to SEQ ID NO: 13363

SEQ ID NO: 15364 - protein, 98 aa, Homo sapiens; identical to SEQ ID NO: 13364

SEQ ID NO: 15365 - protein, 110 aa, Homo sapiens; identical to SEQ ID NO: 13365

SEQ ID NO: 15366 - protein, 98 aa, Homo sapiens; identical to SEQ ID NO: 13366

SEQ ID NO: 15367 - protein, 110 aa, Homo sapiens; identical to SEQ ID NO: 13367

SEQ ID NO: 15368 - protein, 99 aa, Homo sapiens; identical to SEQ ID NO: 13368

SEQ ID NO: 15369 - protein, 110 aa, Homo sapiens; identical to SEQ ID NO: 13369

SEQ ID NO: 15370 - protein, 99 aa, Homo sapiens; identical to SEQ ID NO: 13370

SEQ ID NO: 15371 - protein, 110 aa, Homo sapiens; identical to SEQ ID NO: 13371

SEQ ID NO: 15372 - protein, 98 aa, Homo sapiens; identical to SEQ ID NO: 13372

SEQ ID NO: 15373 - protein, 110 aa, Homo sapiens; identical to SEQ ID NO: 13373

SEQ ID NO: 15374 - protein, 98 aa, Homo sapiens; identical to SEQ ID NO: 13374

SEQ ID NO: 15375 - protein, 111 aa, Homo sapiens; identical to SEQ ID NO: 13375

SEQ ID NO: 15376 - protein, 98 aa, Homo sapiens; identical to SEQ ID NO: 13376

SEQ ID NO: 15377 - protein, 111 aa, Homo sapiens; identical to SEQ ID NO: 13377

SEQ ID NO: 15378 - protein, 99 aa, Homo sapiens; identical to SEQ ID NO: 13378

SEQ ID NO: 15379 - protein, 110 aa, Homo sapiens; identical to SEQ ID NO: 13379

SEQ ID NO: 15380 - protein, 99 aa, Homo sapiens; identical to SEQ ID NO: 13380

SEQ ID NO: 15381 - protein, 110 aa, Homo sapiens; identical to SEQ ID NO: 13381

SEQ ID NO: 15382 - protein, 98 aa, Homo sapiens; identical to SEQ ID NO: 13382

SEQ ID NO: 15383 - protein, 110 aa, Homo sapiens; identical to SEQ ID NO: 13383

SEQ ID NO: 15384 - protein, 98 aa, Homo sapiens; identical to SEQ ID NO: 13384

SEQ ID NO: 15385 - protein, 110 aa, Homo sapiens; identical to SEQ ID NO: 13385

SEQ ID NO: 15386 - protein, 98 aa, Homo sapiens; identical to SEQ ID NO: 13386

SEQ ID NO: 15387 - protein, 111 aa, Homo sapiens; identical to SEQ ID NO: 13387

SEQ ID NO: 15388 - protein, 97 aa, Homo sapiens; identical to SEQ ID NO: 13388

SEQ ID NO: 15389 - protein, 110 aa, Homo sapiens; identical to SEQ ID NO: 13389

SEQ ID NO: 15390 - protein, 96 aa, Homo sapiens; identical to SEQ ID NO: 13390

SEQ ID NO: 15391 - protein, 110 aa, Homo sapiens; identical to SEQ ID NO: 13391

SEQ ID NO: 15392 - protein, 97 aa, Homo sapiens; identical to SEQ ID NO: 13392

SEQ ID NO: 15393 - protein, 110 aa, Homo sapiens; identical to SEQ ID NO: 13393

SEQ ID NO: 15394 - protein, 96 aa, Homo sapiens; identical to SEQ ID NO: 13394

SEQ ID NO: 15395 - protein, 110 aa, Homo sapiens; identical to SEQ ID NO: 13395

SEQ ID NO: 15396 - protein, 96 aa, Homo sapiens; identical to SEQ ID NO: 13396

SEQ ID NO: 15397 - protein, 110 aa, Homo sapiens; identical to SEQ ID NO: 13397

SEQ ID NO: 15398 - protein, 98 aa, Homo sapiens; identical to SEQ ID NO: 13398

SEQ ID NO: 15399 - protein, 110 aa, Homo sapiens; identical to SEQ ID NO: 13399

SEQ ID NO: 15400 - protein, 98 aa, Homo sapiens; identical to SEQ ID NO: 13400

SEQ ID NO: 15401 - protein, 110 aa, Homo sapiens; identical to SEQ ID NO: 13401

SEQ ID NO: 15402 - protein, 98 aa, Homo sapiens; identical to SEQ ID NO: 13402

SEQ ID NO: 15403 - protein, 110 aa, Homo sapiens; identical to SEQ ID NO: 13403

SEQ ID NO: 15404 - protein, 98 aa, Homo sapiens; identical to SEQ ID NO: 13404

SEQ ID NO: 15405 - protein, 110 aa, Homo sapiens; identical to SEQ ID NO: 13405

SEQ ID NO: 15406 - protein, 98 aa, Homo sapiens; identical to SEQ ID NO: 13406

SEQ ID NO: 15407 - protein, 110 aa, Homo sapiens; identical to SEQ ID NO: 13407

SEQ ID NO: 15408 - protein, 99 aa, Homo sapiens; identical to SEQ ID NO: 13408

SEQ ID NO: 15409 - protein, 110 aa, Homo sapiens; identical to SEQ ID NO: 13409

SEQ ID NO: 15410 - protein, 98 aa, Homo sapiens; identical to SEQ ID NO: 13410

SEQ ID NO: 15411 - protein, 110 aa, Homo sapiens; identical to SEQ ID NO: 13411

SEQ ID NO: 15412 - protein, 97 aa, Homo sapiens; identical to SEQ ID NO: 13412

SEQ ID NO: 15413 - protein, 98 aa, Homo sapiens; identical to SEQ ID NO: 13413

SEQ ID NO: 15414 - protein, 99 aa, Homo sapiens; identical to SEQ ID NO: 13414

SEQ ID NO: 15415 - protein, 110 aa, Homo sapiens; identical to SEQ ID NO: 13415

SEQ ID NO: 15416 - protein, 110 aa, Homo sapiens; identical to SEQ ID NO: 13416

SEQ ID NO: 15417 - protein, 111 aa, Homo sapiens; identical to SEQ ID NO: 13417

SEQ ID NO: 15418 - protein, 99 aa, Homo sapiens; identical to SEQ ID NO: 13418

SEQ ID NO: 15419 - protein, 110 aa, Homo sapiens; identical to SEQ ID NO: 13419

SEQ ID NO: 15420 - protein, 98 aa, Homo sapiens; identical to SEQ ID NO: 13420

SEQ ID NO: 15421 - protein, 110 aa, Homo sapiens; identical to SEQ ID NO: 13421

SEQ ID NO: 15422 - protein, 98 aa, Homo sapiens; identical to SEQ ID NO: 13422

SEQ ID NO: 15423 - protein, 110 aa, Homo sapiens; identical to SEQ ID NO: 13423

SEQ ID NO: 15424 - protein, 111 aa, Homo sapiens; identical to SEQ ID NO: 13424

SEQ ID NO: 15425 - protein, 110 aa, Homo sapiens; identical to SEQ ID NO: 13425

SEQ ID NO: 15426 - protein, 99 aa, Homo sapiens; identical to SEQ ID NO: 13426

SEQ ID NO: 15427 - protein, 110 aa, Homo sapiens; identical to SEQ ID NO: 13427

SEQ ID NO: 15428 - protein, 98 aa, Homo sapiens; identical to SEQ ID NO: 13428

SEQ ID NO: 15429 - protein, 111 aa, Homo sapiens; identical to SEQ ID NO: 13429

SEQ ID NO: 15430 - protein, 98 aa, Homo sapiens; identical to SEQ ID NO: 13430

SEQ ID NO: 15431 - protein, 111 aa, Homo sapiens; identical to SEQ ID NO: 13431

SEQ ID NO: 15432 - protein, 98 aa, Homo sapiens; identical to SEQ ID NO: 13432

SEQ ID NO: 15433 - protein, 109 aa, Homo sapiens; identical to SEQ ID NO: 13433

SEQ ID NO: 15434 - protein, 96 aa, Homo sapiens; identical to SEQ ID NO: 13434

SEQ ID NO: 15435 - protein, 110 aa, Homo sapiens; identical to SEQ ID NO: 13435

SEQ ID NO: 15436 - protein, 98 aa, Homo sapiens; identical to SEQ ID NO: 13436

SEQ ID NO: 15437 - protein, 111 aa, Homo sapiens; identical to SEQ ID NO: 13437

SEQ ID NO: 15438 - protein, 98 aa, Homo sapiens; identical to SEQ ID NO: 13438

SEQ ID NO: 15439 - protein, 111 aa, Homo sapiens; identical to SEQ ID NO: 13439

SEQ ID NO: 15440 - protein, 96 aa, Homo sapiens; identical to SEQ ID NO: 13440

SEQ ID NO: 15441 - protein, 110 aa, Homo sapiens; identical to SEQ ID NO: 13441

SEQ ID NO: 15442 - protein, 98 aa, Homo sapiens; identical to SEQ ID NO: 13442

SEQ ID NO: 15443 - protein, 110 aa, Homo sapiens; identical to SEQ ID NO: 13443

SEQ ID NO: 15444 - protein, 98 aa, Homo sapiens; identical to SEQ ID NO: 13444

SEQ ID NO: 15445 - protein, 110 aa, Homo sapiens; identical to SEQ ID NO: 13445

SEQ ID NO: 15446 - protein, 93 aa, Homo sapiens; identical to SEQ ID NO: 13446

SEQ ID NO: 15447 - protein, 108 aa, Homo sapiens; identical to SEQ ID NO: 13447

SEQ ID NO: 15448 - protein, 98 aa, Homo sapiens; identical to SEQ ID NO: 13448

SEQ ID NO: 15449 - protein, 110 aa, Homo sapiens; identical to SEQ ID NO: 13449

SEQ ID NO: 15450 - protein, 99 aa, Homo sapiens; identical to SEQ ID NO: 13450

SEQ ID NO: 15451 - protein, 110 aa, Homo sapiens; identical to SEQ ID NO: 13451

SEQ ID NO: 15452 - protein, 99 aa, Homo sapiens; identical to SEQ ID NO: 13452

SEQ ID NO: 15453 - protein, 111 aa, Homo sapiens; identical to SEQ ID NO: 13453

SEQ ID NO: 15454 - protein, 98 aa, Homo sapiens; identical to SEQ ID NO: 13454

SEQ ID NO: 15455 - protein, 110 aa, Homo sapiens; identical to SEQ ID NO: 13455

SEQ ID NO: 15456 - protein, 98 aa, Homo sapiens; identical to SEQ ID NO: 13456

SEQ ID NO: 15457 - protein, 111 aa, Homo sapiens; identical to SEQ ID NO: 13457

SEQ ID NO: 15458 - protein, 98 aa, Homo sapiens; identical to SEQ ID NO: 13458

SEQ ID NO: 15459 - protein, 110 aa, Homo sapiens; identical to SEQ ID NO: 13459

SEQ ID NO: 15460 - protein, 99 aa, Homo sapiens; identical to SEQ ID NO: 13460

SEQ ID NO: 15461 - protein, 110 aa, Homo sapiens; identical to SEQ ID NO: 13461

SEQ ID NO: 15462 - protein, 98 aa, Homo sapiens; identical to SEQ ID NO: 13462

SEQ ID NO: 15463 - protein, 110 aa, Homo sapiens; identical to SEQ ID NO: 13463

SEQ ID NO: 15464 - protein, 98 aa, Homo sapiens; identical to SEQ ID NO: 13464

SEQ ID NO: 15465 - protein, 110 aa, Homo sapiens; identical to SEQ ID NO: 13465

SEQ ID NO: 15466 - protein, 98 aa, Homo sapiens; identical to SEQ ID NO: 13466

SEQ ID NO: 15467 - protein, 110 aa, Homo sapiens; identical to SEQ ID NO: 13467

SEQ ID NO: 15468 - protein, 98 aa, Homo sapiens; identical to SEQ ID NO: 13468

SEQ ID NO: 15469 - protein, 110 aa, Homo sapiens; identical to SEQ ID NO: 13469

SEQ ID NO: 15470 - protein, 98 aa, Homo sapiens; identical to SEQ ID NO: 13470

SEQ ID NO: 15471 - protein, 99 aa, Homo sapiens; identical to SEQ ID NO: 13471

SEQ ID NO: 15472 - protein, 110 aa, Homo sapiens; identical to SEQ ID NO: 13472

SEQ ID NO: 15473 - protein, 111 aa, Homo sapiens; identical to SEQ ID NO: 13473

SEQ ID NO: 15474 - protein, 98 aa, Homo sapiens; identical to SEQ ID NO: 13474

SEQ ID NO: 15475 - protein, 110 aa, Homo sapiens; identical to SEQ ID NO: 13475

SEQ ID NO: 15476 - protein, 98 aa, Homo sapiens; identical to SEQ ID NO: 13476

SEQ ID NO: 15477 - protein, 99 aa, Homo sapiens; identical to SEQ ID NO: 13477

SEQ ID NO: 15478 - protein, 112 aa, Homo sapiens; identical to SEQ ID NO: 13478

SEQ ID NO: 15479 - protein, 110 aa, Homo sapiens; identical to SEQ ID NO: 13479

SEQ ID NO: 15480 - protein, 111 aa, Homo sapiens; identical to SEQ ID NO: 13480

SEQ ID NO: 15481 - protein, 110 aa, Homo sapiens; identical to SEQ ID NO: 13481

SEQ ID NO: 15482 - protein, 111 aa, Homo sapiens; identical to SEQ ID NO: 13482

SEQ ID NO: 15483 - protein, 99 aa, Homo sapiens; identical to SEQ ID NO: 13483

SEQ ID NO: 15484 - protein, 113 aa, Homo sapiens; identical to SEQ ID NO: 13484

SEQ ID NO: 15485 - protein, 99 aa, Homo sapiens; identical to SEQ ID NO: 13485

SEQ ID NO: 15486 - protein, 110 aa, Homo sapiens; identical to SEQ ID NO: 13486

SEQ ID NO: 15487 - protein, 99 aa, Homo sapiens; identical to SEQ ID NO: 13487

SEQ ID NO: 15488 - protein, 110 aa, Homo sapiens; identical to SEQ ID NO: 13488

SEQ ID NO: 15489 - protein, 99 aa, Homo sapiens; identical to SEQ ID NO: 13489

SEQ ID NO: 15490 - protein, 110 aa, Homo sapiens; identical to SEQ ID NO: 13490

SEQ ID NO: 15491 - protein, 98 aa, Homo sapiens; identical to SEQ ID NO: 13491

SEQ ID NO: 15492 - protein, 110 aa, Homo sapiens; identical to SEQ ID NO: 13492

SEQ ID NO: 15493 - protein, 97 aa, Homo sapiens; identical to SEQ ID NO: 13493

SEQ ID NO: 15494 - protein, 110 aa, Homo sapiens; identical to SEQ ID NO: 13494

SEQ ID NO: 15495 - protein, 99 aa, Homo sapiens; identical to SEQ ID NO: 13495

SEQ ID NO: 15496 - protein, 111 aa, Homo sapiens; identical to SEQ ID NO: 13496

SEQ ID NO: 15497 - protein, 98 aa, Homo sapiens; identical to SEQ ID NO: 13497

SEQ ID NO: 15498 - protein, 110 aa, Homo sapiens; identical to SEQ ID NO: 13498

SEQ ID NO: 15499 - protein, 99 aa, Homo sapiens; identical to SEQ ID NO: 13499

SEQ ID NO: 15500 - protein, 111 aa, Homo sapiens; identical to SEQ ID NO: 13500

SEQ ID NO: 15501 - protein, 99 aa, Homo sapiens; identical to SEQ ID NO: 13501

SEQ ID NO: 15502 - protein, 112 aa, Homo sapiens; identical to SEQ ID NO: 13502

SEQ ID NO: 15503 - protein, 100 aa, Homo sapiens; identical to SEQ ID NO: 13503

SEQ ID NO: 15504 - protein, 112 aa, Homo sapiens; identical to SEQ ID NO: 13504

SEQ ID NO: 15505 - protein, 97 aa, Homo sapiens; identical to SEQ ID NO: 13505

SEQ ID NO: 15506 - protein, 111 aa, Homo sapiens; identical to SEQ ID NO: 13506

SEQ ID NO: 15507 - protein, 99 aa, Homo sapiens; identical to SEQ ID NO: 13507

SEQ ID NO: 15508 - protein, 112 aa, Homo sapiens; identical to SEQ ID NO: 13508

SEQ ID NO: 15509 - protein, 100 aa, Homo sapiens; identical to SEQ ID NO: 13509

SEQ ID NO: 15510 - protein, 112 aa, Homo sapiens; identical to SEQ ID NO: 13510

SEQ ID NO: 15511 - protein, 100 aa, Homo sapiens; identical to SEQ ID NO: 13511

SEQ ID NO: 15512 - protein, 111 aa, Homo sapiens; identical to SEQ ID NO: 13512

SEQ ID NO: 15513 - protein, 98 aa, Homo sapiens; identical to SEQ ID NO: 13513

SEQ ID NO: 15514 - protein, 111 aa, Homo sapiens; identical to SEQ ID NO: 13514

SEQ ID NO: 15515 - protein, 99 aa, Homo sapiens; identical to SEQ ID NO: 13515

SEQ ID NO: 15516 - protein, 112 aa, Homo sapiens; identical to SEQ ID NO: 13516

SEQ ID NO: 15517 - protein, 112 aa, Homo sapiens; identical to SEQ ID NO: 13517

SEQ ID NO: 15518 - protein, 100 aa, Homo sapiens; identical to SEQ ID NO: 13518

SEQ ID NO: 15519 - protein, 111 aa, Homo sapiens; identical to SEQ ID NO: 13519

SEQ ID NO: 15520 - protein, 111 aa, Homo sapiens; identical to SEQ ID NO: 13520

SEQ ID NO: 15521 - protein, 111 aa, Homo sapiens; identical to SEQ ID NO: 13521

SEQ ID NO: 15522 - protein, 112 aa, Homo sapiens; identical to SEQ ID NO: 13522

SEQ ID NO: 15523 - protein, 110 aa, Homo sapiens; identical to SEQ ID NO: 13523

SEQ ID NO: 15524 - protein, 98 aa, Homo sapiens; identical to SEQ ID NO: 13524

SEQ ID NO: 15525 - protein, 110 aa, Homo sapiens; identical to SEQ ID NO: 13525

SEQ ID NO: 15526 - protein, 100 aa, Homo sapiens; identical to SEQ ID NO: 13526

SEQ ID NO: 15527 - protein, 111 aa, Homo sapiens; identical to SEQ ID NO: 13527

SEQ ID NO: 15528 - protein, 97 aa, Homo sapiens; identical to SEQ ID NO: 13528

SEQ ID NO: 15529 - protein, 111 aa, Homo sapiens; identical to SEQ ID NO: 13529

SEQ ID NO: 15530 - protein, 99 aa, Homo sapiens; identical to SEQ ID NO: 13530

SEQ ID NO: 15531 - protein, 111 aa, Homo sapiens; identical to SEQ ID NO: 13531

SEQ ID NO: 15532 - protein, 97 aa, Homo sapiens; identical to SEQ ID NO: 13532

SEQ ID NO: 15533 - protein, 111 aa, Homo sapiens; identical to SEQ ID NO: 13533

SEQ ID NO: 15534 - protein, 97 aa, Homo sapiens; identical to SEQ ID NO: 13534

SEQ ID NO: 15535 - protein, 111 aa, Homo sapiens; identical to SEQ ID NO: 13535

SEQ ID NO: 15536 - protein, 97 aa, Homo sapiens; identical to SEQ ID NO: 13536

SEQ ID NO: 15537 - protein, 110 aa, Homo sapiens; identical to SEQ ID NO: 13537

SEQ ID NO: 15538 - protein, 97 aa, Homo sapiens; identical to SEQ ID NO: 13538

SEQ ID NO: 15539 - protein, 110 aa, Homo sapiens; identical to SEQ ID NO: 13539

SEQ ID NO: 15540 - protein, 100 aa, Homo sapiens; identical to SEQ ID NO: 13540

SEQ ID NO: 15541 - protein, 111 aa, Homo sapiens; identical to SEQ ID NO: 13541

SEQ ID NO: 15542 - protein, 99 aa, Homo sapiens; identical to SEQ ID NO: 13542

SEQ ID NO: 15543 - protein, 111 aa, Homo sapiens; identical to SEQ ID NO: 13543

SEQ ID NO: 15544 - protein, 94 aa, Homo sapiens; identical to SEQ ID NO: 13544

SEQ ID NO: 15545 - protein, 108 aa, Homo sapiens; identical to SEQ ID NO: 13545

SEQ ID NO: 15546 - protein, 98 aa, Homo sapiens; identical to SEQ ID NO: 13546

SEQ ID NO: 15547 - protein, 110 aa, Homo sapiens; identical to SEQ ID NO: 13547

SEQ ID NO: 15548 - protein, 99 aa, Homo sapiens; identical to SEQ ID NO: 13548

SEQ ID NO: 15549 - protein, 111 aa, Homo sapiens; identical to SEQ ID NO: 13549

SEQ ID NO: 15550 - protein, 98 aa, Homo sapiens; identical to SEQ ID NO: 13550

SEQ ID NO: 15551 - protein, 110 aa, Homo sapiens; identical to SEQ ID NO: 13551

SEQ ID NO: 15552 - protein, 94 aa, Homo sapiens; identical to SEQ ID NO: 13552

SEQ ID NO: 15553 - protein, 110 aa, Homo sapiens; identical to SEQ ID NO: 13553

SEQ ID NO: 15554 - protein, 98 aa, Homo sapiens; identical to SEQ ID NO: 13554

SEQ ID NO: 15555 - protein, 110 aa, Homo sapiens; identical to SEQ ID NO: 13555

SEQ ID NO: 15556 - protein, 96 aa, Homo sapiens; identical to SEQ ID NO: 13556

SEQ ID NO: 15557 - protein, 110 aa, Homo sapiens; identical to SEQ ID NO: 13557

SEQ ID NO: 15558 - protein, 96 aa, Homo sapiens; identical to SEQ ID NO: 13558

SEQ ID NO: 15559 - protein, 110 aa, Homo sapiens; identical to SEQ ID NO: 13559

SEQ ID NO: 15560 - protein, 103 aa, Homo sapiens; identical to SEQ ID NO: 13560

SEQ ID NO: 15561 - protein, 115 aa, Homo sapiens; identical to SEQ ID NO: 13561

SEQ ID NO: 15562 - protein, 96 aa, Homo sapiens; identical to SEQ ID NO: 13562

SEQ ID NO: 15563 - protein, 110 aa, Homo sapiens; identical to SEQ ID NO: 13563

SEQ ID NO: 15564 - protein, 11 aa, Homo sapiens
QSYDGRNQDVV

SEQ ID NO: 15565 - protein, 11 aa, Homo sapiens
QSYDNSLHIWV

SEQ ID NO: 15566 - protein, 11 aa, Homo sapiens
QSYDNSLSGSV

SEQ ID NO: 15567 - protein, 11 aa, Homo sapiens
QSYDRSLRGYV

SEQ ID NO: 15568 - protein, 12 aa, Homo sapiens
QSYDRSLSGLSV

SEQ ID NO: 15569 - protein, 12 aa, Homo sapiens
QSYDRSLSGSGV

SEQ ID NO: 15570 - protein, 11 aa, Homo sapiens
QSYDRSLSGSV

SEQ ID NO: 15571 - protein, 11 aa, Homo sapiens
QSYDSSLHIWV

SEQ ID NO: 15572 - protein, 11 aa, Homo sapiens
QSYDSSLHVWV

SEQ ID NO: 15573 - protein, 11 aa, Homo sapiens
QSYDSSLNHWV

SEQ ID NO: 15574 - protein, 10 aa, Homo sapiens
QSYDSSLREV

SEQ ID NO: 15575 - protein, 11 aa, Homo sapiens
QSYDSSLSAWV

SEQ ID NO: 15576 - protein, 12 aa, Homo sapiens
QSYDSSLSGARV

SEQ ID NO: 15577 - protein, 12 aa, Homo sapiens
QSYDSSLSGKVV

SEQ ID NO: 15578 - protein, 11 aa, Homo sapiens
QSYDSSLSGSV

SEQ ID NO: 15579 - protein, 11 aa, Homo sapiens
QSYDSSLSGWV

SEQ ID NO: 15580 - protein, 12 aa, Homo sapiens
QSYDSSLSGYAV

SEQ ID NO: 15581 - protein, 11 aa, Homo sapiens
QSYDSSLSGYV

SEQ ID NO: 15582 - protein, 12 aa, Homo sapiens
QSYDSSLSGYVV

SEQ ID NO: 15583 - protein, 10 aa, Homo sapiens
QSYDSSLSVL

SEQ ID NO: 15584 - protein, 9 aa, Homo sapiens
QSYDSSNQV

SEQ ID NO: 15585 - protein, 10 aa, Homo sapiens
QSYDSSNQVV

SEQ ID NO: 15586 - protein, 10 aa, Homo sapiens
QSYDSSNRGV

SEQ ID NO: 15587 - protein, 10 aa, Homo sapiens
QSYDSTLSVV

SEQ ID NO: 15588 - protein, 9 aa, Homo sapiens
QSYDTSARV

SEQ ID NO: 15589 - protein, 12 aa, Homo sapiens
QSYDTSLSGSYV

SEQ ID NO: 15590 - protein, 12 aa, Homo sapiens
QSYDTTLSGIYV

SEQ ID NO: 15591 - protein, 98 aa, Homo sapiens; identical to SEQ ID NO: 13591

SEQ ID NO: 15592 - protein, 111 aa, Homo sapiens; identical to SEQ ID NO: 13592

SEQ ID NO: 15593 - protein, 6 aa, Homo sapiens
QTPRGP

SEQ ID NO: 15594 - protein, 17 aa, Homo sapiens
QTRDPPYCSDGNCPINE

SEQ ID NO: 15595 - protein, 7 aa, Homo sapiens
QTSNLES

SEQ ID NO: 15596 - protein, 99 aa, Homo sapiens; identical to SEQ ID NO: 13596

SEQ ID NO: 15597 - protein, 110 aa, Homo sapiens; identical to SEQ ID NO: 13597

SEQ ID NO: 15598 - protein, 96 aa, Homo sapiens; identical to SEQ ID NO: 13598

SEQ ID NO: 15599 - protein, 109 aa, Homo sapiens; identical to SEQ ID NO: 13599

SEQ ID NO: 15600 - protein, 98 aa, Homo sapiens; identical to SEQ ID NO: 13600

SEQ ID NO: 15601 - protein, 110 aa, Homo sapiens; identical to SEQ ID NO: 13601

SEQ ID NO: 15602 - protein, 110 aa, Homo sapiens; identical to SEQ ID NO: 13602

SEQ ID NO: 15603 - protein, 96 aa, Homo sapiens; identical to SEQ ID NO: 13603

SEQ ID NO: 15604 - protein, 108 aa, Homo sapiens; identical to SEQ ID NO: 13604

SEQ ID NO: 15605 - protein, 97 aa, Homo sapiens; identical to SEQ ID NO: 13605

SEQ ID NO: 15606 - protein, 109 aa, Homo sapiens; identical to SEQ ID NO: 13606

SEQ ID NO: 15607 - protein, 10 aa, Homo sapiens
QTWDKKVGVV

SEQ ID NO: 15608 - protein, 10 aa, Homo sapiens
QTWDSATGGV

SEQ ID NO: 15609 - protein, 9 aa, Homo sapiens
QTWDSSTVV

SEQ ID NO: 15610 - protein, 9 aa, Homo sapiens
QTWDTGIRV

SEQ ID NO: 15611 - protein, 10 aa, Homo sapiens
QTWGGGIQGV

SEQ ID NO: 15612 - protein, 9 aa, Homo sapiens
QTWGSGIAV

SEQ ID NO: 15613 - protein, 9 aa, Homo sapiens
QTWGTDSYV

SEQ ID NO: 15614 - protein, 9 aa, Homo sapiens
QTWGTGFWV

SEQ ID NO: 15615 - protein, 12 aa, Homo sapiens
QTWGTGIHASWV

SEQ ID NO: 15616 - protein, 11 aa, Homo sapiens
QTWGTGIPLAV

SEQ ID NO: 15617 - protein, 9 aa, Homo sapiens
QTWGTGIQV

SEQ ID NO: 15618 - protein, 10 aa, Homo sapiens
QTWGTGIQVV

SEQ ID NO: 15619 - protein, 9 aa, Homo sapiens
QTWGTGIVV

SEQ ID NO: 15620 - protein, 9 aa, Homo sapiens
QTWGTGIWV

SEQ ID NO: 15621 - protein, 9 aa, Homo sapiens
QTWGTGLYV

SEQ ID NO: 15622 - protein, 9 aa, Homo sapiens
QTWGTGMYV

SEQ ID NO: 15623 - protein, 9 aa, Homo sapiens
QTWGTGTVV

SEQ ID NO: 15624 - protein, 9 aa, Homo sapiens
QTWHNNTVI

SEQ ID NO: 15625 - protein, 9 aa, Homo sapiens
QTWVTGHYV

SEQ ID NO: 15626 - protein, 13 aa, Homo sapiens
QVEGSGSVTYFQH

SEQ ID NO: 15627 - protein, 97 aa, Homo sapiens; identical to SEQ ID NO: 13627

SEQ ID NO: 15628 - protein, 120 aa, Homo sapiens; identical to SEQ ID NO: 13628

SEQ ID NO: 15629 - protein, 97 aa, Homo sapiens; identical to SEQ ID NO: 13629

SEQ ID NO: 15630 - protein, 120 aa, Homo sapiens; identical to SEQ ID NO: 13630

SEQ ID NO: 15631 - protein, 98 aa, Homo sapiens; identical to SEQ ID NO: 13631

SEQ ID NO: 15632 - protein, 122 aa, Homo sapiens; identical to SEQ ID NO: 13632

SEQ ID NO: 15633 - protein, 98 aa, Homo sapiens; identical to SEQ ID NO: 13633

SEQ ID NO: 15634 - protein, 123 aa, Homo sapiens; identical to SEQ ID NO: 13634

SEQ ID NO: 15635 - protein, 97 aa, Homo sapiens; identical to SEQ ID NO: 13635

SEQ ID NO: 15636 - protein, 121 aa, Homo sapiens; identical to SEQ ID NO: 13636

SEQ ID NO: 15637 - protein, 99 aa, Homo sapiens; identical to SEQ ID NO: 13637

SEQ ID NO: 15638 - protein, 128 aa, Homo sapiens; identical to SEQ ID NO: 13638

SEQ ID NO: 15639 - protein, 98 aa, Homo sapiens; identical to SEQ ID NO: 13639

SEQ ID NO: 15640 - protein, 124 aa, Homo sapiens; identical to SEQ ID NO: 13640

SEQ ID NO: 15641 - protein, 98 aa, Homo sapiens; identical to SEQ ID NO: 13641

SEQ ID NO: 15642 - protein, 122 aa, Homo sapiens; identical to SEQ ID NO: 13642

SEQ ID NO: 15643 - protein, 98 aa, Homo sapiens; identical to SEQ ID NO: 13643

SEQ ID NO: 15644 - protein, 122 aa, Homo sapiens; identical to SEQ ID NO: 13644

SEQ ID NO: 15645 - protein, 98 aa, Homo sapiens; identical to SEQ ID NO: 13645

SEQ ID NO: 15646 - protein, 126 aa, Homo sapiens; identical to SEQ ID NO: 13646

SEQ ID NO: 15647 - protein, 98 aa, Homo sapiens; identical to SEQ ID NO: 13647

SEQ ID NO: 15648 - protein, 126 aa, Homo sapiens; identical to SEQ ID NO: 13648

SEQ ID NO: 15649 - protein, 98 aa, Homo sapiens; identical to SEQ ID NO: 13649

SEQ ID NO: 15650 - protein, 126 aa, Homo sapiens; identical to SEQ ID NO: 13650

SEQ ID NO: 15651 - protein, 98 aa, Homo sapiens; identical to SEQ ID NO: 13651

SEQ ID NO: 15652 - protein, 126 aa, Homo sapiens; identical to SEQ ID NO: 13652

SEQ ID NO: 15653 - protein, 98 aa, Homo sapiens; identical to SEQ ID NO: 13653

SEQ ID NO: 15654 - protein, 126 aa, Homo sapiens; identical to SEQ ID NO: 13654

SEQ ID NO: 15655 - protein, 98 aa, Homo sapiens; identical to SEQ ID NO: 13655

SEQ ID NO: 15656 - protein, 126 aa, Homo sapiens; identical to SEQ ID NO: 13656

SEQ ID NO: 15657 - protein, 98 aa, Homo sapiens; identical to SEQ ID NO: 13657

SEQ ID NO: 15658 - protein, 123 aa, Homo sapiens; identical to SEQ ID NO: 13658

SEQ ID NO: 15659 - protein, 98 aa, Homo sapiens; identical to SEQ ID NO: 13659

SEQ ID NO: 15660 - protein, 127 aa, Homo sapiens; identical to SEQ ID NO: 13660

SEQ ID NO: 15661 - protein, 97 aa, Homo sapiens; identical to SEQ ID NO: 13661

SEQ ID NO: 15662 - protein, 115 aa, Homo sapiens; identical to SEQ ID NO: 13662

SEQ ID NO: 15663 - protein, 99 aa, Homo sapiens; identical to SEQ ID NO: 13663

SEQ ID NO: 15664 - protein, 131 aa, Homo sapiens; identical to SEQ ID NO: 13664

SEQ ID NO: 15665 - protein, 99 aa, Homo sapiens; identical to SEQ ID NO: 13665

SEQ ID NO: 15666 - protein, 131 aa, Homo sapiens; identical to SEQ ID NO: 13666

SEQ ID NO: 15667 - protein, 99 aa, Homo sapiens; identical to SEQ ID NO: 13667

SEQ ID NO: 15668 - protein, 122 aa, Homo sapiens; identical to SEQ ID NO: 13668

SEQ ID NO: 15669 - protein, 97 aa, Homo sapiens; identical to SEQ ID NO: 13669

SEQ ID NO: 15670 - protein, 122 aa, Homo sapiens; identical to SEQ ID NO: 13670

SEQ ID NO: 15671 - protein, 98 aa, Homo sapiens; identical to SEQ ID NO: 13671

SEQ ID NO: 15672 - protein, 125 aa, Homo sapiens; identical to SEQ ID NO: 13672

SEQ ID NO: 15673 - protein, 98 aa, Homo sapiens; identical to SEQ ID NO: 13673

SEQ ID NO: 15674 - protein, 127 aa, Homo sapiens; identical to SEQ ID NO: 13674

SEQ ID NO: 15675 - protein, 98 aa, Homo sapiens; identical to SEQ ID NO: 13675

SEQ ID NO: 15676 - protein, 127 aa, Homo sapiens; identical to SEQ ID NO: 13676

SEQ ID NO: 15677 - protein, 98 aa, Homo sapiens; identical to SEQ ID NO: 13677

SEQ ID NO: 15678 - protein, 123 aa, Homo sapiens; identical to SEQ ID NO: 13678

SEQ ID NO: 15679 - protein, 98 aa, Homo sapiens; identical to SEQ ID NO: 13679

SEQ ID NO: 15680 - protein, 123 aa, Homo sapiens; identical to SEQ ID NO: 13680

SEQ ID NO: 15681 - protein, 98 aa, Homo sapiens; identical to SEQ ID NO: 13681

SEQ ID NO: 15682 - protein, 127 aa, Homo sapiens; identical to SEQ ID NO: 13682

SEQ ID NO: 15683 - protein, 98 aa, Homo sapiens; identical to SEQ ID NO: 13683

SEQ ID NO: 15684 - protein, 127 aa, Homo sapiens; identical to SEQ ID NO: 13684

SEQ ID NO: 15685 - protein, 98 aa, Homo sapiens; identical to SEQ ID NO: 13685

SEQ ID NO: 15686 - protein, 120 aa, Homo sapiens; identical to SEQ ID NO: 13686

SEQ ID NO: 15687 - protein, 98 aa, Homo sapiens; identical to SEQ ID NO: 13687

SEQ ID NO: 15688 - protein, 126 aa, Homo sapiens; identical to SEQ ID NO: 13688

SEQ ID NO: 15689 - protein, 98 aa, Homo sapiens; identical to SEQ ID NO: 13689

SEQ ID NO: 15690 - protein, 122 aa, Homo sapiens; identical to SEQ ID NO: 13690

SEQ ID NO: 15691 - protein, 98 aa, Homo sapiens; identical to SEQ ID NO: 13691

SEQ ID NO: 15692 - protein, 122 aa, Homo sapiens; identical to SEQ ID NO: 13692

SEQ ID NO: 15693 - protein, 98 aa, Homo sapiens; identical to SEQ ID NO: 13693

SEQ ID NO: 15694 - protein, 124 aa, Homo sapiens; identical to SEQ ID NO: 13694

SEQ ID NO: 15695 - protein, 98 aa, Homo sapiens; identical to SEQ ID NO: 13695

SEQ ID NO: 15696 - protein, 121 aa, Homo sapiens; identical to SEQ ID NO: 13696

SEQ ID NO: 15697 - protein, 98 aa, Homo sapiens; identical to SEQ ID NO: 13697

SEQ ID NO: 15698 - protein, 123 aa, Homo sapiens; identical to SEQ ID NO: 13698

SEQ ID NO: 15699 - protein, 98 aa, Homo sapiens; identical to SEQ ID NO: 13699

SEQ ID NO: 15700 - protein, 130 aa, Homo sapiens; identical to SEQ ID NO: 13700

SEQ ID NO: 15701 - protein, 97 aa, Homo sapiens; identical to SEQ ID NO: 13701

SEQ ID NO: 15702 - protein, 123 aa, Homo sapiens; identical to SEQ ID NO: 13702

SEQ ID NO: 15703 - protein, 98 aa, Homo sapiens; identical to SEQ ID NO: 13703

SEQ ID NO: 15704 - protein, 128 aa, Homo sapiens; identical to SEQ ID NO: 13704

SEQ ID NO: 15705 - protein, 98 aa, Homo sapiens; identical to SEQ ID NO: 13705

SEQ ID NO: 15706 - protein, 125 aa, Homo sapiens; identical to SEQ ID NO: 13706

SEQ ID NO: 15707 - protein, 97 aa, Homo sapiens; identical to SEQ ID NO: 13707

SEQ ID NO: 15708 - protein, 123 aa, Homo sapiens; identical to SEQ ID NO: 13708

SEQ ID NO: 15709 - protein, 97 aa, Homo sapiens; identical to SEQ ID NO: 13709

SEQ ID NO: 15710 - protein, 122 aa, Homo sapiens; identical to SEQ ID NO: 13710

SEQ ID NO: 15711 - protein, 97 aa, Homo sapiens; identical to SEQ ID NO: 13711

SEQ ID NO: 15712 - protein, 116 aa, Homo sapiens; identical to SEQ ID NO: 13712

SEQ ID NO: 15713 - protein, 97 aa, Homo sapiens; identical to SEQ ID NO: 13713

SEQ ID NO: 15714 - protein, 126 aa, Homo sapiens; identical to SEQ ID NO: 13714

SEQ ID NO: 15715 - protein, 97 aa, Homo sapiens; identical to SEQ ID NO: 13715

SEQ ID NO: 15716 - protein, 123 aa, Homo sapiens; identical to SEQ ID NO: 13716

SEQ ID NO: 15717 - protein, 98 aa, Homo sapiens; identical to SEQ ID NO: 13717

SEQ ID NO: 15718 - protein, 125 aa, Homo sapiens; identical to SEQ ID NO: 13718

SEQ ID NO: 15719 - protein, 98 aa, Homo sapiens; identical to SEQ ID NO: 13719

SEQ ID NO: 15720 - protein, 124 aa, Homo sapiens; identical to SEQ ID NO: 13720

SEQ ID NO: 15721 - protein, 98 aa, Homo sapiens; identical to SEQ ID NO: 13721

SEQ ID NO: 15722 - protein, 125 aa, Homo sapiens; identical to SEQ ID NO: 13722

SEQ ID NO: 15723 - protein, 105 aa, Homo sapiens; identical to SEQ ID NO: 13723

SEQ ID NO: 15724 - protein, 132 aa, Homo sapiens; identical to SEQ ID NO: 13724

SEQ ID NO: 15725 - protein, 98 aa, Homo sapiens; identical to SEQ ID NO: 13725

SEQ ID NO: 15726 - protein, 122 aa, Homo sapiens; identical to SEQ ID NO: 13726

SEQ ID NO: 15727 - protein, 97 aa, Homo sapiens; identical to SEQ ID NO: 13727

SEQ ID NO: 15728 - protein, 121 aa, Homo sapiens; identical to SEQ ID NO: 13728

SEQ ID NO: 15729 - protein, 98 aa, Homo sapiens; identical to SEQ ID NO: 13729

SEQ ID NO: 15730 - protein, 123 aa, Homo sapiens; identical to SEQ ID NO: 13730

SEQ ID NO: 15731 - protein, 98 aa, Homo sapiens; identical to SEQ ID NO: 13731

SEQ ID NO: 15732 - protein, 121 aa, Homo sapiens; identical to SEQ ID NO: 13732

SEQ ID NO: 15733 - protein, 98 aa, Homo sapiens; identical to SEQ ID NO: 13733

SEQ ID NO: 15734 - protein, 120 aa, Homo sapiens; identical to SEQ ID NO: 13734

SEQ ID NO: 15735 - protein, 98 aa, Homo sapiens; identical to SEQ ID NO: 13735

SEQ ID NO: 15736 - protein, 122 aa, Homo sapiens; identical to SEQ ID NO: 13736

SEQ ID NO: 15737 - protein, 95 aa, Homo sapiens; identical to SEQ ID NO: 13737

SEQ ID NO: 15738 - protein, 119 aa, Homo sapiens; identical to SEQ ID NO: 13738

SEQ ID NO: 15739 - protein, 96 aa, Homo sapiens; identical to SEQ ID NO: 13739

SEQ ID NO: 15740 - protein, 127 aa, Homo sapiens; identical to SEQ ID NO: 13740

SEQ ID NO: 15741 - protein, 97 aa, Homo sapiens; identical to SEQ ID NO: 13741

SEQ ID NO: 15742 - protein, 123 aa, Homo sapiens; identical to SEQ ID NO: 13742

SEQ ID NO: 15743 - protein, 98 aa, Homo sapiens; identical to SEQ ID NO: 13743

SEQ ID NO: 15744 - protein, 128 aa, Homo sapiens; identical to SEQ ID NO: 13744

SEQ ID NO: 15745 - protein, 98 aa, Homo sapiens; identical to SEQ ID NO: 13745

SEQ ID NO: 15746 - protein, 126 aa, Homo sapiens; identical to SEQ ID NO: 13746

SEQ ID NO: 15747 - protein, 97 aa, Homo sapiens; identical to SEQ ID NO: 13747

SEQ ID NO: 15748 - protein, 122 aa, Homo sapiens; identical to SEQ ID NO: 13748

SEQ ID NO: 15749 - protein, 97 aa, Homo sapiens; identical to SEQ ID NO: 13749

SEQ ID NO: 15750 - protein, 121 aa, Homo sapiens; identical to SEQ ID NO: 13750

SEQ ID NO: 15751 - protein, 98 aa, Homo sapiens; identical to SEQ ID NO: 13751

SEQ ID NO: 15752 - protein, 122 aa, Homo sapiens; identical to SEQ ID NO: 13752

SEQ ID NO: 15753 - protein, 97 aa, Homo sapiens; identical to SEQ ID NO: 13753

SEQ ID NO: 15754 - protein, 124 aa, Homo sapiens; identical to SEQ ID NO: 13754

SEQ ID NO: 15755 - protein, 98 aa, Homo sapiens; identical to SEQ ID NO: 13755

SEQ ID NO: 15756 - protein, 121 aa, Homo sapiens; identical to SEQ ID NO: 13756

SEQ ID NO: 15757 - protein, 99 aa, Homo sapiens; identical to SEQ ID NO: 13757

SEQ ID NO: 15758 - protein, 124 aa, Homo sapiens; identical to SEQ ID NO: 13758

SEQ ID NO: 15759 - protein, 97 aa, Homo sapiens; identical to SEQ ID NO: 13759

SEQ ID NO: 15760 - protein, 123 aa, Homo sapiens; identical to SEQ ID NO: 13760

SEQ ID NO: 15761 - protein, 98 aa, Homo sapiens; identical to SEQ ID NO: 13761

SEQ ID NO: 15762 - protein, 123 aa, Homo sapiens; identical to SEQ ID NO: 13762

SEQ ID NO: 15763 - protein, 98 aa, Homo sapiens; identical to SEQ ID NO: 13763

SEQ ID NO: 15764 - protein, 126 aa, Homo sapiens; identical to SEQ ID NO: 13764

SEQ ID NO: 15765 - protein, 98 aa, Homo sapiens; identical to SEQ ID NO: 13765

SEQ ID NO: 15766 - protein, 122 aa, Homo sapiens; identical to SEQ ID NO: 13766

SEQ ID NO: 15767 - protein, 98 aa, Homo sapiens; identical to SEQ ID NO: 13767

SEQ ID NO: 15768 - protein, 122 aa, Homo sapiens; identical to SEQ ID NO: 13768

SEQ ID NO: 15769 - protein, 98 aa, Homo sapiens; identical to SEQ ID NO: 13769

SEQ ID NO: 15770 - protein, 120 aa, Homo sapiens; identical to SEQ ID NO: 13770

SEQ ID NO: 15771 - protein, 98 aa, Homo sapiens; identical to SEQ ID NO: 13771

SEQ ID NO: 15772 - protein, 115 aa, Homo sapiens; identical to SEQ ID NO: 13772

SEQ ID NO: 15773 - protein, 98 aa, Homo sapiens; identical to SEQ ID NO: 13773

SEQ ID NO: 15774 - protein, 122 aa, Homo sapiens; identical to SEQ ID NO: 13774

SEQ ID NO: 15775 - protein, 98 aa, Homo sapiens; identical to SEQ ID NO: 13775

SEQ ID NO: 15776 - protein, 123 aa, Homo sapiens; identical to SEQ ID NO: 13776

SEQ ID NO: 15777 - protein, 98 aa, Homo sapiens; identical to SEQ ID NO: 13777

SEQ ID NO: 15778 - protein, 120 aa, Homo sapiens; identical to SEQ ID NO: 13778

SEQ ID NO: 15779 - protein, 98 aa, Homo sapiens; identical to SEQ ID NO: 13779

SEQ ID NO: 15780 - protein, 128 aa, Homo sapiens; identical to SEQ ID NO: 13780

SEQ ID NO: 15781 - protein, 96 aa, Homo sapiens; identical to SEQ ID NO: 13781

SEQ ID NO: 15782 - protein, 122 aa, Homo sapiens; identical to SEQ ID NO: 13782

SEQ ID NO: 15783 - protein, 98 aa, Homo sapiens; identical to SEQ ID NO: 13783

SEQ ID NO: 15784 - protein, 123 aa, Homo sapiens; identical to SEQ ID NO: 13784

SEQ ID NO: 15785 - protein, 5 aa, Homo sapiens
QVQET

SEQ ID NO: 15786 - protein, 98 aa, Homo sapiens; identical to SEQ ID NO: 13786

SEQ ID NO: 15787 - protein, 130 aa, Homo sapiens; identical to SEQ ID NO: 13787

SEQ ID NO: 15788 - protein, 97 aa, Homo sapiens; identical to SEQ ID NO: 13788

SEQ ID NO: 15789 - protein, 121 aa, Homo sapiens; identical to SEQ ID NO: 13789

SEQ ID NO: 15790 - protein, 96 aa, Homo sapiens; identical to SEQ ID NO: 13790

SEQ ID NO: 15791 - protein, 118 aa, Homo sapiens; identical to SEQ ID NO: 13791

SEQ ID NO: 15792 - protein, 98 aa, Homo sapiens; identical to SEQ ID NO: 13792

SEQ ID NO: 15793 - protein, 122 aa, Homo sapiens; identical to SEQ ID NO: 13793

SEQ ID NO: 15794 - protein, 98 aa, Homo sapiens; identical to SEQ ID NO: 13794

SEQ ID NO: 15795 - protein, 120 aa, Homo sapiens; identical to SEQ ID NO: 13795

SEQ ID NO: 15796 - protein, 98 aa, Homo sapiens; identical to SEQ ID NO: 13796

SEQ ID NO: 15797 - protein, 125 aa, Homo sapiens; identical to SEQ ID NO: 13797

SEQ ID NO: 15798 - protein, 101 aa, Homo sapiens; identical to SEQ ID NO: 13798

SEQ ID NO: 15799 - protein, 125 aa, Homo sapiens; identical to SEQ ID NO: 13799

SEQ ID NO: 15800 - protein, 98 aa, Homo sapiens; identical to SEQ ID NO: 13800

SEQ ID NO: 15801 - protein, 120 aa, Homo sapiens; identical to SEQ ID NO: 13801

SEQ ID NO: 15802 - protein, 98 aa, Homo sapiens; identical to SEQ ID NO: 13802

SEQ ID NO: 15803 - protein, 124 aa, Homo sapiens; identical to SEQ ID NO: 13803

SEQ ID NO: 15804 - protein, 98 aa, Homo sapiens; identical to SEQ ID NO: 13804

SEQ ID NO: 15805 - protein, 124 aa, Homo sapiens; identical to SEQ ID NO: 13805

SEQ ID NO: 15806 - protein, 97 aa, Homo sapiens; identical to SEQ ID NO: 13806

SEQ ID NO: 15807 - protein, 122 aa, Homo sapiens; identical to SEQ ID NO: 13807

SEQ ID NO: 15808 - protein, 97 aa, Homo sapiens; identical to SEQ ID NO: 13808

SEQ ID NO: 15809 - protein, 116 aa, Homo sapiens; identical to SEQ ID NO: 13809

SEQ ID NO: 15810 - protein, 98 aa, Homo sapiens; identical to SEQ ID NO: 13810

SEQ ID NO: 15811 - protein, 122 aa, Homo sapiens; identical to SEQ ID NO: 13811

SEQ ID NO: 15812 - protein, 98 aa, Homo sapiens; identical to SEQ ID NO: 13812

SEQ ID NO: 15813 - protein, 122 aa, Homo sapiens; identical to SEQ ID NO: 13813

SEQ ID NO: 15814 - protein, 98 aa, Homo sapiens; identical to SEQ ID NO: 13814

SEQ ID NO: 15815 - protein, 122 aa, Homo sapiens; identical to SEQ ID NO: 13815

SEQ ID NO: 15816 - protein, 98 aa, Homo sapiens; identical to SEQ ID NO: 13816

SEQ ID NO: 15817 - protein, 122 aa, Homo sapiens; identical to SEQ ID NO: 13817

SEQ ID NO: 15818 - protein, 98 aa, Homo sapiens; identical to SEQ ID NO: 13818

SEQ ID NO: 15819 - protein, 122 aa, Homo sapiens; identical to SEQ ID NO: 13819

SEQ ID NO: 15820 - protein, 98 aa, Homo sapiens; identical to SEQ ID NO: 13820

SEQ ID NO: 15821 - protein, 121 aa, Homo sapiens; identical to SEQ ID NO: 13821

SEQ ID NO: 15822 - protein, 98 aa, Homo sapiens; identical to SEQ ID NO: 13822

SEQ ID NO: 15823 - protein, 122 aa, Homo sapiens; identical to SEQ ID NO: 13823

SEQ ID NO: 15824 - protein, 97 aa, Homo sapiens; identical to SEQ ID NO: 13824

SEQ ID NO: 15825 - protein, 122 aa, Homo sapiens; identical to SEQ ID NO: 13825

SEQ ID NO: 15826 - protein, 97 aa, Homo sapiens; identical to SEQ ID NO: 13826

SEQ ID NO: 15827 - protein, 125 aa, Homo sapiens; identical to SEQ ID NO: 13827

SEQ ID NO: 15828 - protein, 97 aa, Homo sapiens; identical to SEQ ID NO: 13828

SEQ ID NO: 15829 - protein, 122 aa, Homo sapiens; identical to SEQ ID NO: 13829

SEQ ID NO: 15830 - protein, 98 aa, Homo sapiens; identical to SEQ ID NO: 13830

SEQ ID NO: 15831 - protein, 122 aa, Homo sapiens; identical to SEQ ID NO: 13831

SEQ ID NO: 15832 - protein, 97 aa, Homo sapiens; identical to SEQ ID NO: 13832

SEQ ID NO: 15833 - protein, 122 aa, Homo sapiens; identical to SEQ ID NO: 13833

SEQ ID NO: 15834 - protein, 98 aa, Homo sapiens; identical to SEQ ID NO: 13834

SEQ ID NO: 15835 - protein, 123 aa, Homo sapiens; identical to SEQ ID NO: 13835

SEQ ID NO: 15836 - protein, 97 aa, Homo sapiens; identical to SEQ ID NO: 13836

SEQ ID NO: 15837 - protein, 122 aa, Homo sapiens; identical to SEQ ID NO: 13837

SEQ ID NO: 15838 - protein, 98 aa, Homo sapiens; identical to SEQ ID NO: 13838

SEQ ID NO: 15839 - protein, 122 aa, Homo sapiens; identical to SEQ ID NO: 13839

SEQ ID NO: 15840 - protein, 98 aa, Homo sapiens; identical to SEQ ID NO: 13840

SEQ ID NO: 15841 - protein, 121 aa, Homo sapiens; identical to SEQ ID NO: 13841

SEQ ID NO: 15842 - protein, 98 aa, Homo sapiens; identical to SEQ ID NO: 13842

SEQ ID NO: 15843 - protein, 121 aa, Homo sapiens; identical to SEQ ID NO: 13843

SEQ ID NO: 15844 - protein, 97 aa, Homo sapiens; identical to SEQ ID NO: 13844

SEQ ID NO: 15845 - protein, 121 aa, Homo sapiens; identical to SEQ ID NO: 13845

SEQ ID NO: 15846 - protein, 98 aa, Homo sapiens; identical to SEQ ID NO: 13846

SEQ ID NO: 15847 - protein, 122 aa, Homo sapiens; identical to SEQ ID NO: 13847

SEQ ID NO: 15848 - protein, 96 aa, Homo sapiens; identical to SEQ ID NO: 13848

SEQ ID NO: 15849 - protein, 122 aa, Homo sapiens; identical to SEQ ID NO: 13849

SEQ ID NO: 15850 - protein, 98 aa, Homo sapiens; identical to SEQ ID NO: 13850

SEQ ID NO: 15851 - protein, 120 aa, Homo sapiens; identical to SEQ ID NO: 13851

SEQ ID NO: 15852 - protein, 98 aa, Homo sapiens; identical to SEQ ID NO: 13852

SEQ ID NO: 15853 - protein, 124 aa, Homo sapiens; identical to SEQ ID NO: 13853

SEQ ID NO: 15854 - protein, 98 aa, Homo sapiens; identical to SEQ ID NO: 13854

SEQ ID NO: 15855 - protein, 124 aa, Homo sapiens; identical to SEQ ID NO: 13855

SEQ ID NO: 15856 - protein, 97 aa, Homo sapiens; identical to SEQ ID NO: 13856

SEQ ID NO: 15857 - protein, 120 aa, Homo sapiens; identical to SEQ ID NO: 13857

SEQ ID NO: 15858 - protein, 97 aa, Homo sapiens; identical to SEQ ID NO: 13858

SEQ ID NO: 15859 - protein, 119 aa, Homo sapiens; identical to SEQ ID NO: 13859

SEQ ID NO: 15860 - protein, 97 aa, Homo sapiens; identical to SEQ ID NO: 13860

SEQ ID NO: 15861 - protein, 127 aa, Homo sapiens; identical to SEQ ID NO: 13861

SEQ ID NO: 15862 - protein, 97 aa, Homo sapiens; identical to SEQ ID NO: 13862

SEQ ID NO: 15863 - protein, 127 aa, Homo sapiens; identical to SEQ ID NO: 13863

SEQ ID NO: 15864 - protein, 97 aa, Homo sapiens; identical to SEQ ID NO: 13864

SEQ ID NO: 15865 - protein, 122 aa, Homo sapiens; identical to SEQ ID NO: 13865

SEQ ID NO: 15866 - protein, 96 aa, Homo sapiens; identical to SEQ ID NO: 13866

SEQ ID NO: 15867 - protein, 119 aa, Homo sapiens; identical to SEQ ID NO: 13867

SEQ ID NO: 15868 - protein, 96 aa, Homo sapiens; identical to SEQ ID NO: 13868

SEQ ID NO: 15869 - protein, 119 aa, Homo sapiens; identical to SEQ ID NO: 13869

SEQ ID NO: 15870 - protein, 96 aa, Homo sapiens; identical to SEQ ID NO: 13870

SEQ ID NO: 15871 - protein, 131 aa, Homo sapiens; identical to SEQ ID NO: 13871

SEQ ID NO: 15872 - protein, 98 aa, Homo sapiens; identical to SEQ ID NO: 13872

SEQ ID NO: 15873 - protein, 123 aa, Homo sapiens; identical to SEQ ID NO: 13873

SEQ ID NO: 15874 - protein, 97 aa, Homo sapiens; identical to SEQ ID NO: 13874

SEQ ID NO: 15875 - protein, 122 aa, Homo sapiens; identical to SEQ ID NO: 13875

SEQ ID NO: 15876 - protein, 98 aa, Homo sapiens; identical to SEQ ID NO: 13876

SEQ ID NO: 15877 - protein, 124 aa, Homo sapiens; identical to SEQ ID NO: 13877

SEQ ID NO: 15878 - protein, 99 aa, Homo sapiens; identical to SEQ ID NO: 13878

SEQ ID NO: 15879 - protein, 119 aa, Homo sapiens; identical to SEQ ID NO: 13879

SEQ ID NO: 15880 - protein, 97 aa, Homo sapiens; identical to SEQ ID NO: 13880

SEQ ID NO: 15881 - protein, 120 aa, Homo sapiens; identical to SEQ ID NO: 13881

SEQ ID NO: 15882 - protein, 98 aa, Homo sapiens; identical to SEQ ID NO: 13882

SEQ ID NO: 15883 - protein, 122 aa, Homo sapiens; identical to SEQ ID NO: 13883

SEQ ID NO: 15884 - protein, 97 aa, Homo sapiens; identical to SEQ ID NO: 13884

SEQ ID NO: 15885 - protein, 121 aa, Homo sapiens; identical to SEQ ID NO: 13885

SEQ ID NO: 15886 - protein, 97 aa, Homo sapiens; identical to SEQ ID NO: 13886

SEQ ID NO: 15887 - protein, 120 aa, Homo sapiens; identical to SEQ ID NO: 13887

SEQ ID NO: 15888 - protein, 99 aa, Homo sapiens; identical to SEQ ID NO: 13888

SEQ ID NO: 15889 - protein, 124 aa, Homo sapiens; identical to SEQ ID NO: 13889

SEQ ID NO: 15890 - protein, 97 aa, Homo sapiens; identical to SEQ ID NO: 13890

SEQ ID NO: 15891 - protein, 126 aa, Homo sapiens; identical to SEQ ID NO: 13891

SEQ ID NO: 15892 - protein, 97 aa, Homo sapiens; identical to SEQ ID NO: 13892

SEQ ID NO: 15893 - protein, 125 aa, Homo sapiens; identical to SEQ ID NO: 13893

SEQ ID NO: 15894 - protein, 99 aa, Homo sapiens; identical to SEQ ID NO: 13894

SEQ ID NO: 15895 - protein, 123 aa, Homo sapiens; identical to SEQ ID NO: 13895

SEQ ID NO: 15896 - protein, 97 aa, Homo sapiens; identical to SEQ ID NO: 13896

SEQ ID NO: 15897 - protein, 121 aa, Homo sapiens; identical to SEQ ID NO: 13897

SEQ ID NO: 15898 - protein, 102 aa, Homo sapiens; identical to SEQ ID NO: 13898

SEQ ID NO: 15899 - protein, 126 aa, Homo sapiens; identical to SEQ ID NO: 13899

SEQ ID NO: 15900 - protein, 98 aa, Homo sapiens; identical to SEQ ID NO: 13900

SEQ ID NO: 15901 - protein, 125 aa, Homo sapiens; identical to SEQ ID NO: 13901

SEQ ID NO: 15902 - protein, 97 aa, Homo sapiens; identical to SEQ ID NO: 13902

SEQ ID NO: 15903 - protein, 115 aa, Homo sapiens; identical to SEQ ID NO: 13903

SEQ ID NO: 15904 - protein, 99 aa, Homo sapiens; identical to SEQ ID NO: 13904

SEQ ID NO: 15905 - protein, 123 aa, Homo sapiens; identical to SEQ ID NO: 13905

SEQ ID NO: 15906 - protein, 97 aa, Homo sapiens; identical to SEQ ID NO: 13906

SEQ ID NO: 15907 - protein, 120 aa, Homo sapiens; identical to SEQ ID NO: 13907

SEQ ID NO: 15908 - protein, 98 aa, Homo sapiens; identical to SEQ ID NO: 13908

SEQ ID NO: 15909 - protein, 126 aa, Homo sapiens; identical to SEQ ID NO: 13909

SEQ ID NO: 15910 - protein, 97 aa, Homo sapiens; identical to SEQ ID NO: 13910

SEQ ID NO: 15911 - protein, 126 aa, Homo sapiens; identical to SEQ ID NO: 13911

SEQ ID NO: 15912 - protein, 97 aa, Homo sapiens; identical to SEQ ID NO: 13912

SEQ ID NO: 15913 - protein, 126 aa, Homo sapiens; identical to SEQ ID NO: 13913

SEQ ID NO: 15914 - protein, 97 aa, Homo sapiens; identical to SEQ ID NO: 13914

SEQ ID NO: 15915 - protein, 129 aa, Homo sapiens; identical to SEQ ID NO: 13915

SEQ ID NO: 15916 - protein, 98 aa, Homo sapiens; identical to SEQ ID NO: 13916

SEQ ID NO: 15917 - protein, 119 aa, Homo sapiens; identical to SEQ ID NO: 13917

SEQ ID NO: 15918 - protein, 97 aa, Homo sapiens; identical to SEQ ID NO: 13918

SEQ ID NO: 15919 - protein, 122 aa, Homo sapiens; identical to SEQ ID NO: 13919

SEQ ID NO: 15920 - protein, 97 aa, Homo sapiens; identical to SEQ ID NO: 13920

SEQ ID NO: 15921 - protein, 98 aa, Homo sapiens; identical to SEQ ID NO: 13921

SEQ ID NO: 15922 - protein, 122 aa, Homo sapiens; identical to SEQ ID NO: 13922

SEQ ID NO: 15923 - protein, 115 aa, Homo sapiens; identical to SEQ ID NO: 13923

SEQ ID NO: 15924 - protein, 120 aa, Homo sapiens; identical to SEQ ID NO: 13924

SEQ ID NO: 15925 - protein, 119 aa, Homo sapiens; identical to SEQ ID NO: 13925

SEQ ID NO: 15926 - protein, 119 aa, Homo sapiens; identical to SEQ ID NO: 13926

SEQ ID NO: 15927 - protein, 118 aa, Homo sapiens; identical to SEQ ID NO: 13927

SEQ ID NO: 15928 - protein, 122 aa, Homo sapiens; identical to SEQ ID NO: 13928

SEQ ID NO: 15929 - protein, 123 aa, Homo sapiens; identical to SEQ ID NO: 13929

SEQ ID NO: 15930 - protein, 128 aa, Homo sapiens; identical to SEQ ID NO: 13930

SEQ ID NO: 15931 - protein, 97 aa, Homo sapiens; identical to SEQ ID NO: 13931

SEQ ID NO: 15932 - protein, 122 aa, Homo sapiens; identical to SEQ ID NO: 13932

SEQ ID NO: 15933 - protein, 98 aa, Homo sapiens; identical to SEQ ID NO: 13933

SEQ ID NO: 15934 - protein, 124 aa, Homo sapiens; identical to SEQ ID NO: 13934

SEQ ID NO: 15935 - protein, 98 aa, Homo sapiens; identical to SEQ ID NO: 13935

SEQ ID NO: 15936 - protein, 119 aa, Homo sapiens; identical to SEQ ID NO: 13936

SEQ ID NO: 15937 - protein, 97 aa, Homo sapiens; identical to SEQ ID NO: 13937

SEQ ID NO: 15938 - protein, 129 aa, Homo sapiens; identical to SEQ ID NO: 13938

SEQ ID NO: 15939 - protein, 97 aa, Homo sapiens; identical to SEQ ID NO: 13939

SEQ ID NO: 15940 - protein, 121 aa, Homo sapiens; identical to SEQ ID NO: 13940

SEQ ID NO: 15941 - protein, 12 aa, Homo sapiens
RASQSVASSYLA

SEQ ID NO: 15942 - protein, 11 aa, Homo sapiens
RASQSVDGNLA

SEQ ID NO: 15943 - protein, 11 aa, Homo sapiens
RASQSVDNKLA

SEQ ID NO: 15944 - protein, 12 aa, Homo sapiens
RASQSVDNNYLA

SEQ ID NO: 15945 - protein, 11 aa, Homo sapiens
RASQSVDRWLA

SEQ ID NO: 15946 - protein, 11 aa, Homo sapiens
RASQSVDTSLA

SEQ ID NO: 15947 - protein, 12 aa, Homo sapiens
RASQSVESSYLA

SEQ ID NO: 15948 - protein, 11 aa, Homo sapiens
RASQSVFSWLA

SEQ ID NO: 15949 - protein, 11 aa, Homo sapiens
RASQSVGAYVA

SEQ ID NO: 15950 - protein, 11 aa, Homo sapiens
RASQSVGGNLA

SEQ ID NO: 15951 - protein, 12 aa, Homo sapiens
RASQSVGNNFLA

SEQ ID NO: 15952 - protein, 11 aa, Homo sapiens
RASQSVGNSLA

SEQ ID NO: 15953 - protein, 11 aa, Homo sapiens
RASQSVGNWLA

SEQ ID NO: 15954 - protein, 11 aa, Homo sapiens
RASQSVGRDLA

SEQ ID NO: 15955 - protein, 11 aa, Homo sapiens
RASQSVGRYLV

SEQ ID NO: 15956 - protein, 12 aa, Homo sapiens
RASQSVGSGSLA

SEQ ID NO: 15957 - protein, 11 aa, Homo sapiens
RASQSVGSKLA

SEQ ID NO: 15958 - protein, 11 aa, Homo sapiens
RASQSVGSNLA

SEQ ID NO: 15959 - protein, 12 aa, Homo sapiens
RASQSVGSNNLA

SEQ ID NO: 15960 - protein, 12 aa, Homo sapiens
RASQSVGSNSLA

SEQ ID NO: 15961 - protein, 11 aa, Homo sapiens
RASQSVGSSLA

SEQ ID NO: 15962 - protein, 12 aa, Homo sapiens
RASQSVGSSSLA

SEQ ID NO: 15963 - protein, 11 aa, Homo sapiens
RASQSVGSWVA

SEQ ID NO: 15964 - protein, 11 aa, Homo sapiens
RASQSVGSYLA

SEQ ID NO: 15965 - protein, 11 aa, Homo sapiens
RASQSVGTNLA

SEQ ID NO: 15966 - protein, 11 aa, Homo sapiens
RASQSVISYLN

SEQ ID NO: 15967 - protein, 11 aa, Homo sapiens
RASQSVKSFLA

SEQ ID NO: 15968 - protein, 12 aa, Homo sapiens
RASQSVKSNSLA

SEQ ID NO: 15969 - protein, 12 aa, Homo sapiens
RASQSVKSSSLA

SEQ ID NO: 15970 - protein, 11 aa, Homo sapiens
RASQSVLSNLA

SEQ ID NO: 15971 - protein, 12 aa, Homo sapiens
RASQSVNGNCLV

SEQ ID NO: 15972 - protein, 11 aa, Homo sapiens
RASQSVNKFLA

SEQ ID NO: 15973 - protein, 11 aa, Homo sapiens
RASQSVNNNLA

SEQ ID NO: 15974 - protein, 12 aa, Homo sapiens
RASQSVNNNYLA

SEQ ID NO: 15975 - protein, 11 aa, Homo sapiens
RASQSVNNYLA

SEQ ID NO: 15976 - protein, 11 aa, Homo sapiens
RASQSVNSDLA

SEQ ID NO: 15977 - protein, 11 aa, Homo sapiens
RASQSVNSDLA

SEQ ID NO: 15978 - protein, 11 aa, Homo sapiens
RASQSVNSDLV

SEQ ID NO: 15979 - protein, 12 aa, Homo sapiens
RASQSVNSNHLA

SEQ ID NO: 15980 - protein, 11 aa, Homo sapiens
RASQSVNSNLA

SEQ ID NO: 15981 - protein, 12 aa, Homo sapiens
RASQSVNSNNLA

SEQ ID NO: 15982 - protein, 12 aa, Homo sapiens
RASQSVNSNSLA

SEQ ID NO: 15983 - protein, 11 aa, Homo sapiens
RASQSVNSNVA

SEQ ID NO: 15984 - protein, 12 aa, Homo sapiens
RASQSVNSNYLA

SEQ ID NO: 15985 - protein, 12 aa, Homo sapiens
RASQSVNSRYLA

SEQ ID NO: 15986 - protein, 11 aa, Homo sapiens
RASQSVNSYLA

SEQ ID NO: 15987 - protein, 12 aa, Homo sapiens
RASQSVNSYSLV

SEQ ID NO: 15988 - protein, 11 aa, Homo sapiens
RASQSVNTKLA

SEQ ID NO: 15989 - protein, 11 aa, Homo sapiens
RASQSVNTNLA

SEQ ID NO: 15990 - protein, 11 aa, Homo sapiens
RASQSVNTYLA

SEQ ID NO: 15991 - protein, 12 aa, Homo sapiens
RASQSVNVRDLV

SEQ ID NO: 15992 - protein, 12 aa, Homo sapiens
RASQSVRGNFLA

SEQ ID NO: 15993 - protein, 11 aa, Homo sapiens
RASQSVRKFLA

SEQ ID NO: 15994 - protein, 11 aa, Homo sapiens
RASQSVRNFLA

SEQ ID NO: 15995 - protein, 12 aa, Homo sapiens
RASQSVRNNYLA

SEQ ID NO: 15996 - protein, 12 aa, Homo sapiens
RASQSVRNTYLA

SEQ ID NO: 15997 - protein, 11 aa, Homo sapiens
RASQSVRRNVA

SEQ ID NO: 15998 - protein, 11 aa, Homo sapiens
RASQSVRSDLA

SEQ ID NO: 15999 - protein, 11 aa, Homo sapiens
RASQSVRSFLA

SEQ ID NO: 16000 - protein, 11 aa, Homo sapiens
RASQSVRSNLA

SEQ ID NO: 16001 - protein, 12 aa, Homo sapiens
RASQSVRSNSLA

SEQ ID NO: 16002 - protein, 12 aa, Homo sapiens
RASQSVRSNSVA

SEQ ID NO: 16003 - protein, 12 aa, Homo sapiens
RASQSVRSNYLA

SEQ ID NO: 16004 - protein, 12 aa, Homo sapiens
RASQSVRSSSLA

SEQ ID NO: 16005 - protein, 12 aa, Homo sapiens
RASQSVRSSYLA

SEQ ID NO: 16006 - protein, 12 aa, Homo sapiens
RASQSVSASYLA

SEQ ID NO: 16007 - protein, 11 aa, Homo sapiens
RASQSVSDNLA

SEQ ID NO: 16008 - protein, 12 aa, Homo sapiens
RASQSVSDNYLA

SEQ ID NO: 16009 - protein, 11 aa, Homo sapiens
RASQSVSDYLA

SEQ ID NO: 16010 - protein, 12 aa, Homo sapiens
RASQSVSGGFLA

SEQ ID NO: 16011 - protein, 11 aa, Homo sapiens
RASQSVSGNLA

SEQ ID NO: 16012 - protein, 12 aa, Homo sapiens
RASQSVSGNSLA

SEQ ID NO: 16013 - protein, 11 aa, Homo sapiens
RASQSVSGNVA

SEQ ID NO: 16014 - protein, 12 aa, Homo sapiens
RASQSVSGNYLA

SEQ ID NO: 16015 - protein, 11 aa, Homo sapiens
RASQSVSGYLA

SEQ ID NO: 16016 - protein, 11 aa, Homo sapiens
RASQSVSGYLN

SEQ ID NO: 16017 - protein, 11 aa, Homo sapiens
RASQSVSISLA

SEQ ID NO: 16018 - protein, 11 aa, Homo sapiens
RASQSVSKFLA

SEQ ID NO: 16019 - protein, 11 aa, Homo sapiens
RASQSVSNFLA

SEQ ID NO: 16020 - protein, 10 aa, Homo sapiens
RASQSVSNLA

SEQ ID NO: 16021 - protein, 12 aa, Homo sapiens
RASQSVSNNFLA

SEQ ID NO: 16022 - protein, 11 aa, Homo sapiens
RASQSVSNNLA

SEQ ID NO: 16023 - protein, 12 aa, Homo sapiens
RASQSVSNNYLA

SEQ ID NO: 16024 - protein, 11 aa, Homo sapiens
RASQSVSNSLA

SEQ ID NO: 16025 - protein, 12 aa, Homo sapiens
RASQSVSNSRLA

SEQ ID NO: 16026 - protein, 12 aa, Homo sapiens
RASQSVSNSYLA

SEQ ID NO: 16027 - protein, 12 aa, Homo sapiens
RASQSVSNTNLA

SEQ ID NO: 16028 - protein, 12 aa, Homo sapiens
RASQSVSNTYLA

SEQ ID NO: 16029 - protein, 11 aa, Homo sapiens
RASQSVSNWLA

SEQ ID NO: 16030 - protein, 11 aa, Homo sapiens
RASQSVSNYLA

SEQ ID NO: 16031 - protein, 11 aa, Homo sapiens
RASQSVSNYLN

SEQ ID NO: 16032 - protein, 11 aa, Homo sapiens
RASQSVSRFLA

SEQ ID NO: 16033 - protein, 11 aa, Homo sapiens
RASQSVSRHLA

SEQ ID NO: 16034 - protein, 11 aa, Homo sapiens
RASQSVSRKLA

SEQ ID NO: 16035 - protein, 11 aa, Homo sapiens
RASQSVSRYLA

SEQ ID NO: 16036 - protein, 11 aa, Homo sapiens
RASQSVSSDLA

SEQ ID NO: 16037 - protein, 11 aa, Homo sapiens
RASQSVSSFLA

SEQ ID NO: 16038 - protein, 12 aa, Homo sapiens
RASQSVSSGHLA

SEQ ID NO: 16039 - protein, 12 aa, Homo sapiens
RASQSVSSGYLA

SEQ ID NO: 16040 - protein, 11 aa, Homo sapiens
RASQSVSSKLA

SEQ ID NO: 16041 - protein, 11 aa, Homo sapiens
RASQSVSSKVV

SEQ ID NO: 16042 - protein, 11 aa, Homo sapiens
RASQSVSSNCA

SEQ ID NO: 16043 - protein, 12 aa, Homo sapiens
RASQSVSSNCLV

SEQ ID NO: 16044 - protein, 12 aa, Homo sapiens
RASQSVSSNHVA

SEQ ID NO: 16045 - protein, 11 aa, Homo sapiens
RASQSVSSNLA

SEQ ID NO: 16046 - protein, 11 aa, Homo sapiens
RASQSVSSNLV

SEQ ID NO: 16047 - protein, 12 aa, Homo sapiens
RASQSVSSNNLA

SEQ ID NO: 16048 - protein, 12 aa, Homo sapiens
RASQSVSSNSLA

SEQ ID NO: 16049 - protein, 12 aa, Homo sapiens
RASQSVSSNYLA

SEQ ID NO: 16050 - protein, 12 aa, Homo sapiens
RASQSVSSNYLS

SEQ ID NO: 16051 - protein, 12 aa, Homo sapiens
RASQSVSSRSLA

SEQ ID NO: 16052 - protein, 12 aa, Homo sapiens
RASQSVSSRYLA

SEQ ID NO: 16053 - protein, 12 aa, Homo sapiens
RASQSVSSSDLA

SEQ ID NO: 16054 - protein, 12 aa, Homo sapiens
RASQSVSSSHLA

SEQ ID NO: 16055 - protein, 12 aa, Homo sapiens
RASQSVSSSKLA

SEQ ID NO: 16056 - protein, 11 aa, Homo sapiens
RASQSVSSSLA

SEQ ID NO: 16057 - protein, 12 aa, Homo sapiens
RASQSVSSSNLA

SEQ ID NO: 16058 - protein, 12 aa, Homo sapiens
RASQSVSSSQLA

SEQ ID NO: 16059 - protein, 12 aa, Homo sapiens
RASQSVSSSSLA

SEQ ID NO: 16060 - protein, 12 aa, Homo sapiens
RASQSVSSSYFT

SEQ ID NO: 16061 - protein, 12 aa, Homo sapiens
RASQSVSSSYLA

SEQ ID NO: 16062 - protein, 12 aa, Homo sapiens
RASQSVSSSYLG

SEQ ID NO: 16063 - protein, 12 aa, Homo sapiens
RASQSVSSSYLT

SEQ ID NO: 16064 - protein, 12 aa, Homo sapiens
RASQSVSSTSLA

SEQ ID NO: 16065 - protein, 12 aa, Homo sapiens
RASQSVSSTYLA

SEQ ID NO: 16066 - protein, 11 aa, Homo sapiens
RASQSVSSWLA

SEQ ID NO: 16067 - protein, 11 aa, Homo sapiens
RASQSVSSYLA

SEQ ID NO: 16068 - protein, 11 aa, Homo sapiens
RASQSVSSYLN

SEQ ID NO: 16069 - protein, 11 aa, Homo sapiens
RASQSVSTDLA

SEQ ID NO: 16070 - protein, 11 aa, Homo sapiens
RASQSVSTKLA

SEQ ID NO: 16071 - protein, 11 aa, Homo sapiens
RASQSVSTNLA

SEQ ID NO: 16072 - protein, 12 aa, Homo sapiens
RASQSVSTNYLA

SEQ ID NO: 16073 - protein, 11 aa, Homo sapiens
RASQSVSTSLA

SEQ ID NO: 16074 - protein, 11 aa, Homo sapiens
RASQSVSTSVA

SEQ ID NO: 16075 - protein, 11 aa, Homo sapiens
RASQSVSTWLA

SEQ ID NO: 16076 - protein, 11 aa, Homo sapiens
RASQSVSTYLA

SEQ ID NO: 16077 - protein, 11 aa, Homo sapiens
RASQSVSVNLA

SEQ ID NO: 16078 - protein, 11 aa, Homo sapiens
RASQSVSYYLA

SEQ ID NO: 16079 - protein, 11 aa, Homo sapiens
RASQSVTDNLA

SEQ ID NO: 16080 - protein, 12 aa, Homo sapiens
RASQSVTNNYLA

SEQ ID NO: 16081 - protein, 11 aa, Homo sapiens
RASQSVTRNLA

SEQ ID NO: 16082 - protein, 12 aa, Homo sapiens
RASQSVTRNNFV

SEQ ID NO: 16083 - protein, 11 aa, Homo sapiens
RASQSVTSDLA

SEQ ID NO: 16084 - protein, 12 aa, Homo sapiens
RASQSVTSGNLA

SEQ ID NO: 16085 - protein, 11 aa, Homo sapiens
RASQSVTSNLA

SEQ ID NO: 16086 - protein, 11 aa, Homo sapiens
RASQSVTSNLV

SEQ ID NO: 16087 - protein, 12 aa, Homo sapiens
RASQSVTSNSLA

SEQ ID NO: 16088 - protein, 12 aa, Homo sapiens
RASQSVTSNSVA

SEQ ID NO: 16089 - protein, 12 aa, Homo sapiens
RASQSVTSNYLA

SEQ ID NO: 16090 - protein, 12 aa, Homo sapiens
RASQSVTSNYLV

SEQ ID NO: 16091 - protein, 12 aa, Homo sapiens
RASQSVTSSYLA

SEQ ID NO: 16092 - protein, 11 aa, Homo sapiens
RASQSVTSYLA

SEQ ID NO: 16093 - protein, 11 aa, Homo sapiens
RASQSVTTFLA

SEQ ID NO: 16094 - protein, 11 aa, Homo sapiens
RASQSVTTYLA

SEQ ID NO: 16095 - protein, 11 aa, Homo sapiens
RASQSVVSNLA

SEQ ID NO: 16096 - protein, 14 aa, Homo sapiens
RASQTAQSVANYLN

SEQ ID NO: 16097 - protein, 11 aa, Homo sapiens
RASQTIDGGLA

SEQ ID NO: 16098 - protein, 11 aa, Homo sapiens
RASQTIDNFLN

SEQ ID NO: 16099 - protein, 11 aa, Homo sapiens
RASQTIGDHLA

SEQ ID NO: 16100 - protein, 11 aa, Homo sapiens
RASQTIGRNLN

SEQ ID NO: 16101 - protein, 11 aa, Homo sapiens
RASQTIGSNLN

SEQ ID NO: 16102 - protein, 11 aa, Homo sapiens
RASQTIGSWLA

SEQ ID NO: 16103 - protein, 11 aa, Homo sapiens
RASQTIGSYLA

SEQ ID NO: 16104 - protein, 11 aa, Homo sapiens
RASQTIGTSLA

SEQ ID NO: 16105 - protein, 11 aa, Homo sapiens
RASQTILSWLA

SEQ ID NO: 16106 - protein, 12 aa, Homo sapiens
RASQTINRKYLA

SEQ ID NO: 16107 - protein, 11 aa, Homo sapiens
RASQTIRGWLA

SEQ ID NO: 16108 - protein, 11 aa, Homo sapiens
RASQTIRNYLN

SEQ ID NO: 16109 - protein, 11 aa, Homo sapiens
RASQTIRSDLA

SEQ ID NO: 16110 - protein, 11 aa, Homo sapiens
RASQTIRSYLN

SEQ ID NO: 16111 - protein, 12 aa, Homo sapiens
RASQTISGTYLA

SEQ ID NO: 16112 - protein, 11 aa, Homo sapiens
RASQTISRWLA

SEQ ID NO: 16113 - protein, 11 aa, Homo sapiens
RASQTISSDLA

SEQ ID NO: 16114 - protein, 11 aa, Homo sapiens
RASQTISSWLA

SEQ ID NO: 16115 - protein, 11 aa, Homo sapiens
RASQTISSYLN

SEQ ID NO: 16116 - protein, 11 aa, Homo sapiens
RASQTISTWLA

SEQ ID NO: 16117 - protein, 11 aa, Homo sapiens
RASQTISTYLN

SEQ ID NO: 16118 - protein, 11 aa, Homo sapiens
RASQTISTYVN

SEQ ID NO: 16119 - protein, 12 aa, Homo sapiens
RASQTLGGSNLA

SEQ ID NO: 16120 - protein, 12 aa, Homo sapiens
RASQTVKNNNLA

SEQ ID NO: 16121 - protein, 11 aa, Homo sapiens
RASQTVNTKLA

SEQ ID NO: 16122 - protein, 11 aa, Homo sapiens
RASQTVSKWLA

SEQ ID NO: 16123 - protein, 11 aa, Homo sapiens
RASQTVSSGLA

SEQ ID NO: 16124 - protein, 12 aa, Homo sapiens
RASQTVSSSHLA

SEQ ID NO: 16125 - protein, 12 aa, Homo sapiens
RASQTVSSSYLA

SEQ ID NO: 16126 - protein, 11 aa, Homo sapiens
RASQTVSTNLA

SEQ ID NO: 16127 - protein, 11 aa, Homo sapiens
RASQTVTDSLA

SEQ ID NO: 16128 - protein, 11 aa, Homo sapiens
RASQTVTNNLA

SEQ ID NO: 16129 - protein, 11 aa, Homo sapiens
RASQVISNYLG

SEQ ID NO: 16130 - protein, 11 aa, Homo sapiens
RASQYIGNFLN

SEQ ID NO: 16131 - protein, 11 aa, Homo sapiens
RASQYIGTYLN

SEQ ID NO: 16132 - protein, 11 aa, Homo sapiens
RASQYISGYLS

SEQ ID NO: 16133 - protein, 11 aa, Homo sapiens
RASQYISSYLN

SEQ ID NO: 16134 - protein, 11 aa, Homo sapiens
RASQYISYYLN

SEQ ID NO: 16135 - protein, 11 aa, Homo sapiens
RASQYVSINLA

SEQ ID NO: 16136 - protein, 11 aa, Homo sapiens
RASRGIANFLA

SEQ ID NO: 16137 - protein, 11 aa, Homo sapiens
RASRSISKYLN

SEQ ID NO: 16138 - protein, 11 aa, Homo sapiens
RASRSISSWLA

SEQ ID NO: 16139 - protein, 11 aa, Homo sapiens
RASRSISTFLN

SEQ ID NO: 16140 - protein, 11 aa, Homo sapiens
RASRSVERWLA

SEQ ID NO: 16141 - protein, 7 aa, Homo sapiens
RASSLES

SEQ ID NO: 16142 - protein, 7 aa, Homo sapiens
RASSLQS

SEQ ID NO: 16143 - protein, 7 aa, Homo sapiens
RASTLES

SEQ ID NO: 16144 - protein, 7 aa, Homo sapiens
RASVLQS

SEQ ID NO: 16145 - protein, 12 aa, Homo sapiens
RATETVSDNKLA

SEQ ID NO: 16146 - protein, 11 aa, Homo sapiens
RATQGISSSLA

SEQ ID NO: 16147 - protein, 11 aa, Homo sapiens
RATQNISIWLA

SEQ ID NO: 16148 - protein, 11 aa, Homo sapiens
RATQNVRFSLA

SEQ ID NO: 16149 - protein, 11 aa, Homo sapiens
RATQSIGTYLN

SEQ ID NO: 16150 - protein, 11 aa, Homo sapiens
RATQSVNRYLA

SEQ ID NO: 16151 - protein, 11 aa, Homo sapiens
RATQSVNSDLA

SEQ ID NO: 16152 - protein, 6 aa, Homo sapiens
RAYYWG

SEQ ID NO: 16153 - protein, 9 aa, Homo sapiens
RDADMGVAY

SEQ ID NO: 16154 - protein, 7 aa, Homo sapiens
RDAIRPS

SEQ ID NO: 16155 - protein, 9 aa, Homo sapiens
RDATYGVDV

SEQ ID NO: 16156 - protein, 7 aa, Homo sapiens
RDIQRPS

SEQ ID NO: 16157 - protein, 7 aa, Homo sapiens
RDNERPS

SEQ ID NO: 16158 - protein, 7 aa, Homo sapiens
RDNNRPS

SEQ ID NO: 16159 - protein, 7 aa, Homo sapiens
RDNQRPS

SEQ ID NO: 16160 - protein, 9 aa, Homo sapiens
RDNYGYVLY

SEQ ID NO: 16161 - protein, 7 aa, Homo sapiens
RDRNRPS

SEQ ID NO: 16162 - protein, 7 aa, Homo sapiens
RDSNRPS

SEQ ID NO: 16163 - protein, 7 aa, Homo sapiens
RDSTRPS

SEQ ID NO: 16164 - protein, 7 aa, Homo sapiens
RDTERPS

SEQ ID NO: 16165 - protein, 5 aa, Homo sapiens
RDYWS

SEQ ID NO: 16166 - protein, 9 aa, Homo sapiens
RDYYYGMDV

SEQ ID NO: 16167 - protein, 9 aa, Homo sapiens
RETERGLDV

SEQ ID NO: 16168 - protein, 9 aa, Homo sapiens
RETVVGVDY

SEQ ID NO: 16169 - protein, 5 aa, Homo sapiens
RFALS

SEQ ID NO: 16170 - protein, 5 aa, Homo sapiens
RFAMH

SEQ ID NO: 16171 - protein, 5 aa, Homo sapiens
RFGMS

SEQ ID NO: 16172 - protein, 16 aa, Homo sapiens
RFHTSGSVNYNPSLKS

SEQ ID NO: 16173 - protein, 19 aa, Homo sapiens
RFKTYTDGGTTDYAAPVKG

SEQ ID NO: 16174 - protein, 5 aa, Homo sapiens
RFTMF

SEQ ID NO: 16175 - protein, 5 aa, Homo sapiens
RFTMY

SEQ ID NO: 16176 - protein, 5 aa, Homo sapiens
RFWMD

SEQ ID NO: 16177 - protein, 5 aa, Homo sapiens
RGAIS

SEQ ID NO: 16178 - protein, 12 aa, Homo sapiens
RGAYSSGRDFDY

SEQ ID NO: 16179 - protein, 11 aa, Homo sapiens
RGDSGYDYFDY

SEQ ID NO: 16180 - protein, 12 aa, Homo sapiens
RGGAAVAGAFDV

SEQ ID NO: 16181 - protein, 12 aa, Homo sapiens
RGGEAVAGGWLY

SEQ ID NO: 16182 - protein, 10 aa, Homo sapiens
RGGSGSGPDY

SEQ ID NO: 16183 - protein, 12 aa, Homo sapiens
RGGVDVAGAFDI

SEQ ID NO: 16184 - protein, 12 aa, Homo sapiens
RGGVEVAGAFDI

SEQ ID NO: 16185 - protein, 8 aa, Homo sapiens
RGNNNCPY

SEQ ID NO: 16186 - protein, 12 aa, Homo sapiens
RGQQLGGNWFDP

SEQ ID NO: 16187 - protein, 14 aa, Homo sapiens
RGSGSYYNAYYFDY

SEQ ID NO: 16188 - protein, 10 aa, Homo sapiens
RGSGTYDFDH

SEQ ID NO: 16189 - protein, 11 aa, Homo sapiens
RGSQSVSSNLA

SEQ ID NO: 16190 - protein, 11 aa, Homo sapiens
RGWYRNGAMDV

SEQ ID NO: 16191 - protein, 22 aa, Homo sapiens
RGYDVLTGYFPNKPYSYYGLDV

SEQ ID NO: 16192 - protein, 23 aa, Homo sapiens
RGYSERVLRYFDWVSWEGDYFDY

SEQ ID NO: 16193 - protein, 11 aa, Homo sapiens
RGYYDRSGYDY

SEQ ID NO: 16194 - protein, 6 aa, Homo sapiens
RGYYWG

SEQ ID NO: 16195 - protein, 5 aa, Homo sapiens
RHAIH

SEQ ID NO: 16196 - protein, 5 aa, Homo sapiens
RHAIS

SEQ ID NO: 16197 - protein, 5 aa, Homo sapiens
RHAMT

SEQ ID NO: 16198 - protein, 5 aa, Homo sapiens
RHAVN

SEQ ID NO: 16199 - protein, 5 aa, Homo sapiens
RHAVS

SEQ ID NO: 16200 - protein, 5 aa, Homo sapiens
RHGIH

SEQ ID NO: 16201 - protein, 16 aa, Homo sapiens
RHHDPLTGQYSPWFDP

SEQ ID NO: 16202 - protein, 5 aa, Homo sapiens
RHPMN

SEQ ID NO: 16203 - protein, 5 aa, Homo sapiens
RHSMS

SEQ ID NO: 16204 - protein, 9 aa, Homo sapiens
RHTDFNMDV

SEQ ID NO: 16205 - protein, 9 aa, Homo sapiens
RHTDYNLDV

SEQ ID NO: 16206 - protein, 9 aa, Homo sapiens
RHTDYNMDV

SEQ ID NO: 16207 - protein, 14 aa, Homo sapiens
RIAIPGTSWYYFDY

SEQ ID NO: 16208 - protein, 5 aa, Homo sapiens
RIAMS

SEQ ID NO: 16209 - protein, 17 aa, Homo sapiens
RIDFDGNVTTYADSVRG

SEQ ID NO: 16210 - protein, 17 aa, Homo sapiens
RIDNGGSYTTYADSVKG

SEQ ID NO: 16211 - protein, 17 aa, Homo sapiens
RIDPEDGETNYAEKFQG

SEQ ID NO: 16212 - protein, 17 aa, Homo sapiens
RIDPRDSYTKYSPSFQG

SEQ ID NO: 16213 - protein, 17 aa, Homo sapiens
RIDPRDSYTRYSPSFQG

SEQ ID NO: 16214 - protein, 17 aa, Homo sapiens
RIDPRDSYTSYSPSFQG

SEQ ID NO: 16215 - protein, 17 aa, Homo sapiens
RIDPSDSYTDYSPSFQG

SEQ ID NO: 16216 - protein, 16 aa, Homo sapiens
RIDWDDDKYYNTSLKT

SEQ ID NO: 16217 - protein, 16 aa, Homo sapiens
RIDWDNDEYYSTSLKT

SEQ ID NO: 16218 - protein, 8 aa, Homo sapiens
RIEGGFDP

SEQ ID NO: 16219 - protein, 16 aa, Homo sapiens
RIFISGSTDYNPSLKS

SEQ ID NO: 16220 - protein, 16 aa, Homo sapiens
RIFISGSTNYNPSLKS

SEQ ID NO: 16221 - protein, 17 aa, Homo sapiens
RIFPSSGATDYADKFRG

SEQ ID NO: 16222 - protein, 16 aa, Homo sapiens
RIFTSGSTNYNPSLKS

SEQ ID NO: 16223 - protein, 16 aa, Homo sapiens
RIFTSGTTSYNPSLKS

SEQ ID NO: 16224 - protein, 16 aa, Homo sapiens
RIFVSGSTNYNSSLKS

SEQ ID NO: 16225 - protein, 16 aa, Homo sapiens
RIHISGSTNYNPSLTS

SEQ ID NO: 16226 - protein, 16 aa, Homo sapiens
RIHTSGSTNFNPSLKS

SEQ ID NO: 16227 - protein, 16 aa, Homo sapiens
RIHTTGSTNYNPSLKS

SEQ ID NO: 16228 - protein, 16 aa, Homo sapiens
RIHVSGTTTYNPSLKS

SEQ ID NO: 16229 - protein, 17 aa, Homo sapiens
RIIPIFRTAKYAQKFQG

SEQ ID NO: 16230 - protein, 17 aa, Homo sapiens
RIIPILDITNYAQKFQG

SEQ ID NO: 16231 - protein, 17 aa, Homo sapiens
RIIPILGIANYAQKFQG

SEQ ID NO: 16232 - protein, 17 aa, Homo sapiens
RIIPILGIVDYAQKFQG

SEQ ID NO: 16233 - protein, 17 aa, Homo sapiens
RIIPILGMTNYAQKFQG

SEQ ID NO: 16234 - protein, 17 aa, Homo sapiens
RIIPILGMTNYAQNFQG

SEQ ID NO: 16235 - protein, 17 aa, Homo sapiens
RIIPIVTISNYAQKFQG

SEQ ID NO: 16236 - protein, 17 aa, Homo sapiens
RIIPLLGISNNAQKFQG

SEQ ID NO: 16237 - protein, 17 aa, Homo sapiens
RIIPLLGITNYAQKFQG

SEQ ID NO: 16238 - protein, 17 aa, Homo sapiens
RIIPMFGTTNYAQKFQA

SEQ ID NO: 16239 - protein, 17 aa, Homo sapiens
RIIPMLGMTNYAQRFQG

SEQ ID NO: 16240 - protein, 17 aa, Homo sapiens
RIIPVIGLVNYAQKFQG

SEQ ID NO: 16241 - protein, 17 aa, Homo sapiens
RIIPVLGMTNYAQKFQG

SEQ ID NO: 16242 - protein, 17 aa, Homo sapiens
RIIRDGTYTNYADSVKG

SEQ ID NO: 16243 - protein, 17 aa, Homo sapiens
RIKNDGGTTDYAAPVRG

SEQ ID NO: 16244 - protein, 17 aa, Homo sapiens
RIKSDGSATTYTGSVKG

SEQ ID NO: 16245 - protein, 17 aa, Homo sapiens
RIKSDGSSTSYADSVKG

SEQ ID NO: 16246 - protein, 19 aa, Homo sapiens
RIKSKIDGGTTDYAAPVKG

SEQ ID NO: 16247 - protein, 19 aa, Homo sapiens
RIKSKIDGGTTDYPAPVKG

SEQ ID NO: 16248 - protein, 19 aa, Homo sapiens
RIKSKTAGGTTDYAAPVKG

SEQ ID NO: 16249 - protein, 19 aa, Homo sapiens
RIKSKTDGETTDYAAPVRG

SEQ ID NO: 16250 - protein, 19 aa, Homo sapiens
RIKSKTDGGTTDYAAPVKG

SEQ ID NO: 16251 - protein, 19 aa, Homo sapiens
RIKSKTDGGTTNYAAPVKD

SEQ ID NO: 16252 - protein, 19 aa, Homo sapiens
RIKSKTNGGATDYAAPVKG

SEQ ID NO: 16253 - protein, 19 aa, Homo sapiens
RIKSNPNGGTRDYAAPVKG

SEQ ID NO: 16254 - protein, 17 aa, Homo sapiens
RIKTDGSSTSYADSVEG

SEQ ID NO: 16255 - protein, 19 aa, Homo sapiens
RIKTEIDGGTTDYAAPVKG

SEQ ID NO: 16256 - protein, 19 aa, Homo sapiens
RIKTKTDGGTTDYAVPVKG

SEQ ID NO: 16257 - protein, 17 aa, Homo sapiens
RILPTFGTTRYAQKFQG

SEQ ID NO: 16258 - protein, 17 aa, Homo sapiens
RINGDGSSTDYADSVKG

SEQ ID NO: 16259 - protein, 17 aa, Homo sapiens
RINGDGSSTSYADSVKG

SEQ ID NO: 16260 - protein, 17 aa, Homo sapiens
RINGDGTKINYVDSVKG

SEQ ID NO: 16261 - protein, 17 aa, Homo sapiens
RINIDGSRTNYAESVKG

SEQ ID NO: 16262 - protein, 17 aa, Homo sapiens
RINIDGSSTTYADSVKG

SEQ ID NO: 16263 - protein, 17 aa, Homo sapiens
RINKDGTTTDYADSVKG

SEQ ID NO: 16264 - protein, 17 aa, Homo sapiens
RINNDGSLTTNADSVKG

SEQ ID NO: 16265 - protein, 17 aa, Homo sapiens
RINPENGGTRSVQRLQG

SEQ ID NO: 16266 - protein, 17 aa, Homo sapiens
RINPKNGDTVYAQKFQG

SEQ ID NO: 16267 - protein, 17 aa, Homo sapiens
RINPKNGGTKYAQKFQG

SEQ ID NO: 16268 - protein, 17 aa, Homo sapiens
RINPKTGGTAYAQDFQG

SEQ ID NO: 16269 - protein, 17 aa, Homo sapiens
RINPKTGGTKYAQKFQG

SEQ ID NO: 16270 - protein, 17 aa, Homo sapiens
RINPNNGGTYYAQTFQG

SEQ ID NO: 16271 - protein, 17 aa, Homo sapiens
RINPNRGGTYYAQKFQG

SEQ ID NO: 16272 - protein, 17 aa, Homo sapiens
RINPNSGGTNYAQKFQG

SEQ ID NO: 16273 - protein, 17 aa, Homo sapiens
RINPNTGGTNSAQKFRG

SEQ ID NO: 16274 - protein, 17 aa, Homo sapiens
RINPQTGGSDSTQKFQG

SEQ ID NO: 16275 - protein, 17 aa, Homo sapiens
RINSDGDSVNYADSVKG

SEQ ID NO: 16276 - protein, 17 aa, Homo sapiens
RINSDGSSTDYADSVKG

SEQ ID NO: 16277 - protein, 17 aa, Homo sapiens
RINSDGSSTSYADSVKG

SEQ ID NO: 16278 - protein, 17 aa, Homo sapiens
RINTGHGDTLYSHKFQD

SEQ ID NO: 16279 - protein, 16 aa, Homo sapiens
RINTSGNTNYNPSLKS

SEQ ID NO: 16280 - protein, 16 aa, Homo sapiens
RINTSGSSNYNPSLKS

SEQ ID NO: 16281 - protein, 16 aa, Homo sapiens
RINTSGSTNYNPSLKS

SEQ ID NO: 16282 - protein, 12 aa, Homo sapiens
RIPHMNFDAFDI

SEQ ID NO: 16283 - protein, 8 aa, Homo sapiens
RIRGVFDY

SEQ ID NO: 16284 - protein, 19 aa, Homo sapiens
RIRKNANSYTTEYAASVKG

SEQ ID NO: 16285 - protein, 19 aa, Homo sapiens
RIRNKANSYITEYGASMRG

SEQ ID NO: 16286 - protein, 17 aa, Homo sapiens
RISAHDGDTKYARNFQG

SEQ ID NO: 16287 - protein, 17 aa, Homo sapiens
RISAHDGDTKYTQNFQG

SEQ ID NO: 16288 - protein, 17 aa, Homo sapiens
RISAHNGDTKYTQKFQG

SEQ ID NO: 16289 - protein, 17 aa, Homo sapiens
RISAQDDDIKYSQKFQD

SEQ ID NO: 16290 - protein, 16 aa, Homo sapiens
RISASGSSNYNPSLEN

SEQ ID NO: 16291 - protein, 17 aa, Homo sapiens
RISEYKGNTNYAQKLQG

SEQ ID NO: 16292 - protein, 19 aa, Homo sapiens
RISMIEDVVVDNQMGVFDM

SEQ ID NO: 16293 - protein, 17 aa, Homo sapiens
RISPDGRTTNYADSVKG

SEQ ID NO: 16294 - protein, 17 aa, Homo sapiens
RISPDGSIATYADSVKG

SEQ ID NO: 16295 - protein, 17 aa, Homo sapiens
RISYDGTNKYYADSVKG

SEQ ID NO: 16296 - protein, 17 aa, Homo sapiens
RITPIFHRTNYAQNFQG

SEQ ID NO: 16297 - protein, 17 aa, Homo sapiens
RITPILGMTNYAEKFQG

SEQ ID NO: 16298 - protein, 17 aa, Homo sapiens
RITPILGMTNYAQKFQG

SEQ ID NO: 16299 - protein, 19 aa, Homo sapiens
RIWTEVNSYATAYAASVSG

SEQ ID NO: 16300 - protein, 16 aa, Homo sapiens
RIYANGYTTYNPSLKS

SEQ ID NO: 16301 - protein, 16 aa, Homo sapiens
RIYASGSTNYNPSLKS

SEQ ID NO: 16302 - protein, 16 aa, Homo sapiens
RIYASGYTKYNPSLKS

SEQ ID NO: 16303 - protein, 16 aa, Homo sapiens
RIYISGRTNYNPSLKS

SEQ ID NO: 16304 - protein, 16 aa, Homo sapiens
RIYISGSTKYNPSLKS

SEQ ID NO: 16305 - protein, 16 aa, Homo sapiens
RIYISGSTNYNPSLES

SEQ ID NO: 16306 - protein, 16 aa, Homo sapiens
RIYISGSTNYNPSLKS

SEQ ID NO: 16307 - protein, 16 aa, Homo sapiens
RIYSSGSTDYNPSLKS

SEQ ID NO: 16308 - protein, 16 aa, Homo sapiens
RIYTSGNTNYNPSLKS

SEQ ID NO: 16309 - protein, 16 aa, Homo sapiens
RIYTSGSTKYNPSLES

SEQ ID NO: 16310 - protein, 16 aa, Homo sapiens
RIYTSGSTKYNPSLKS

SEQ ID NO: 16311 - protein, 16 aa, Homo sapiens
RIYTSGSTNYNPSLKS

SEQ ID NO: 16312 - protein, 16 aa, Homo sapiens
RIYTSVGTNYNPSLKS

SEQ ID NO: 16313 - protein, 16 aa, Homo sapiens
RIYVSGSTKYNPSLKS

SEQ ID NO: 16314 - protein, 8 aa, Homo sapiens
RKDAYNDY

SEQ ID NO: 16315 - protein, 12 aa, Homo sapiens
RKWGIVDWYFDL

SEQ ID NO: 16316 - protein, 96 aa, Homo sapiens
RLLDSGGGLVHPGGSLRLSCAASGVSFSGHILGWVRQAPGRGLEWISTLSFLDESIYYADSVKGRFTISRDASKTTLYLQMDSLRSDDSAIYYCVR

SEQ ID NO: 16317 - protein, 120 aa, Homo sapiens
RLLDSGGGLVHPGGSLRLSCAASGVSFSGHILGWVRQAPGRGLEWISTLSFLDESIYYADSVKGRFTISRDASKTTLYLQMDSLRSDDSAIYYCVREGHTSGRCGTFDPWGQGTMVTVSS

SEQ ID NO: 16318 - protein, 16 aa, Homo sapiens
RLYISGSTNYNPSLKS

SEQ ID NO: 16319 - protein, 16 aa, Homo sapiens
RMFTSGTTDYNPSLKS

SEQ ID NO: 16320 - protein, 19 aa, Homo sapiens
RMRSKTKSYATAYAVSVKG

SEQ ID NO: 16321 - protein, 17 aa, Homo sapiens
RMSPIFGTSKYAQKFQG

SEQ ID NO: 16322 - protein, 11 aa, Homo sapiens
RMSQGISSYLA

SEQ ID NO: 16323 - protein, 16 aa, Homo sapiens
RMYISGSTNYNPSLKS

SEQ ID NO: 16324 - protein, 5 aa, Homo sapiens
RNAMS

SEQ ID NO: 16325 - protein, 7 aa, Homo sapiens
RNDNRPS

SEQ ID NO: 16326 - protein, 7 aa, Homo sapiens
RNDQRPS

SEQ ID NO: 16327 - protein, 7 aa, Homo sapiens
RNHQRPS

SEQ ID NO: 16328 - protein, 7 aa, Homo sapiens
RNKQRPS

SEQ ID NO: 16329 - protein, 7 aa, Homo sapiens
RNNERPS

SEQ ID NO: 16330 - protein, 7 aa, Homo sapiens
RNNNRPS

SEQ ID NO: 16331 - protein, 7 aa, Homo sapiens
RNNQRPS

SEQ ID NO: 16332 - protein, 7 aa, Homo sapiens
RNNQWPS

SEQ ID NO: 16333 - protein, 7 aa, Homo sapiens
RNNSRPS

SEQ ID NO: 16334 - protein, 7 aa, Homo sapiens
RNSQRPS

SEQ ID NO: 16335 - protein, 5 aa, Homo sapiens
RNTIS

SEQ ID NO: 16336 - protein, 5 aa, Homo sapiens
RNTIT

SEQ ID NO: 16337 - protein, 5 aa, Homo sapiens
RNWMS

SEQ ID NO: 16338 - protein, 12 aa, Homo sapiens
RPRFGELSQPDY

SEQ ID NO: 16339 - protein, 12 aa, Homo sapiens
RPSQDMSTNSLA

SEQ ID NO: 16340 - protein, 11 aa, Homo sapiens
RPSQNINTYLN

SEQ ID NO: 16341 - protein, 11 aa, Homo sapiens
RPSQSISSYLN

SEQ ID NO: 16342 - protein, 16 aa, Homo sapiens
RPSQSLVYSDGDTYLN

SEQ ID NO: 16343 - protein, 14 aa, Homo sapiens
RPVGFGSGSYYFDY

SEQ ID NO: 16344 - protein, 20 aa, Homo sapiens
RQGVYESLTGYFGSRGHFDF

SEQ ID NO: 16345 - protein, 9 aa, Homo sapiens
RQYYGTPFT

SEQ ID NO: 16346 - protein, 9 aa, Homo sapiens
RQYYTTPYT

SEQ ID NO: 16347 - protein, 17 aa, Homo sapiens
RRNQYESSGYYKSPFDP

SEQ ID NO: 16348 - protein, 13 aa, Homo sapiens
RRRRGSDWYTLDY

SEQ ID NO: 16349 - protein, 13 aa, Homo sapiens
RRVVRGVRDAFDI

SEQ ID NO: 16350 - protein, 13 aa, Homo sapiens
RRYYGSGSRWFDP

SEQ ID NO: 16351 - protein, 5 aa, Homo sapiens
RSEMN

SEQ ID NO: 16352 - protein, 7 aa, Homo sapiens
RSFTREN

SEQ ID NO: 16353 - protein, 16 aa, Homo sapiens
RSGQSLAYIDGNTYLN

SEQ ID NO: 16354 - protein, 16 aa, Homo sapiens
RSGQSLLQSSGHNYLD

SEQ ID NO: 16355 - protein, 16 aa, Homo sapiens
RSGQSLLYSDGDTYLN

SEQ ID NO: 16356 - protein, 11 aa, Homo sapiens
RSGQTIFTYLN

SEQ ID NO: 16357 - protein, 16 aa, Homo sapiens
RSGRSLVHSDGNIYFN

SEQ ID NO: 16358 - protein, 10 aa, Homo sapiens
RSGSRYYFDY

SEQ ID NO: 16359 - protein, 16 aa, Homo sapiens
RSNQSLLHSNGKNYLD

SEQ ID NO: 16360 - protein, 16 aa, Homo sapiens
RSNQSLLYRDGNTYLY

SEQ ID NO: 16361 - protein, 16 aa, Homo sapiens
RSNQSLVYSDGDTYLS

SEQ ID NO: 16362 - protein, 16 aa, Homo sapiens
RSNQSLVYSDGVTYLN

SEQ ID NO: 16363 - protein, 17 aa, Homo sapiens
RSPGGVYDSWSGSYLSH

SEQ ID NO: 16364 - protein, 19 aa, Homo sapiens
RSRNKANRYSTDYTASVKG

SEQ ID NO: 16365 - protein, 19 aa, Homo sapiens
RSRNKVNKYSTVYLASVQG

SEQ ID NO: 16366 - protein, 10 aa, Homo sapiens
RSRPGRRFDY

SEQ ID NO: 16367 - protein, 16 aa, Homo sapiens
RSSASLVYSDGNTYLD

SEQ ID NO: 16368 - protein, 16 aa, Homo sapiens
RSSENLVHKDGNTYLN

SEQ ID NO: 16369 - protein, 9 aa, Homo sapiens
RSSESGTDY

SEQ ID NO: 16370 - protein, 6 aa, Homo sapiens
RSSFDP

SEQ ID NO: 16371 - protein, 16 aa, Homo sapiens
RSSHGLVYKDGNTYLH

SEQ ID NO: 16372 - protein, 16 aa, Homo sapiens
RSSHSLVSSDGNTYLN

SEQ ID NO: 16373 - protein, 16 aa, Homo sapiens
RSSHSLVYSDGDTYLI

SEQ ID NO: 16374 - protein, 5 aa, Homo sapiens
RSSIG

SEQ ID NO: 16375 - protein, 16 aa, Homo sapiens
RSSLNLVHDDGHTYLS

SEQ ID NO: 16376 - protein, 17 aa, Homo sapiens
RSSLSVFYNSNNKNYLA

SEQ ID NO: 16377 - protein, 16 aa, Homo sapiens
RSSQDLVHNDGNTYLN

SEQ ID NO: 16378 - protein, 17 aa, Homo sapiens
RSSQDVLYSSNNKNYLA

SEQ ID NO: 16379 - protein, 16 aa, Homo sapiens
RSSQGLVFSDGNTYLS

SEQ ID NO: 16380 - protein, 16 aa, Homo sapiens
RSSQGLVFVDGNTYLS

SEQ ID NO: 16381 - protein, 16 aa, Homo sapiens
RSSQGLVYIDGNTYLS

SEQ ID NO: 16382 - protein, 16 aa, Homo sapiens
RSSQGLVYSDGNTYLN

SEQ ID NO: 16383 - protein, 16 aa, Homo sapiens
RSSQGLVYSDGNTYLS

SEQ ID NO: 16384 - protein, 16 aa, Homo sapiens
RSSQGLVYSDGNTYLT

SEQ ID NO: 16385 - protein, 16 aa, Homo sapiens
RSSQGLVYSDGVTYFN

SEQ ID NO: 16386 - protein, 16 aa, Homo sapiens
RSSQPLVYSDGRTFLS

SEQ ID NO: 16387 - protein, 16 aa, Homo sapiens
RSSQRFEHSDGTIYLS

SEQ ID NO: 16388 - protein, 17 aa, Homo sapiens
RSSQSILHTSDNKNYLS

SEQ ID NO: 16389 - protein, 17 aa, Homo sapiens
RSSQSILYSSNYKNYLA

SEQ ID NO: 16390 - protein, 11 aa, Homo sapiens
RSSQSISNNLA

SEQ ID NO: 16391 - protein, 16 aa, Homo sapiens
RSSQSLAHSDGNTLLN

SEQ ID NO: 16392 - protein, 16 aa, Homo sapiens
RSSQSLLHDDGHTYMY

SEQ ID NO: 16393 - protein, 17 aa, Homo sapiens
RSSQSLLHGNDGKTYLS

SEQ ID NO: 16394 - protein, 16 aa, Homo sapiens
RSSQSLLHGNGHTYLD

SEQ ID NO: 16395 - protein, 16 aa, Homo sapiens
RSSQSLLHGNGNNYLD

SEQ ID NO: 16396 - protein, 16 aa, Homo sapiens
RSSQSLLHGNGYNYLD

SEQ ID NO: 16397 - protein, 16 aa, Homo sapiens
RSSQSLLHGNGYTYLD

SEQ ID NO: 16398 - protein, 16 aa, Homo sapiens
RSSQSLLHNNGYNYLG

SEQ ID NO: 16399 - protein, 16 aa, Homo sapiens
RSSQSLLHNSGYNYLS

SEQ ID NO: 16400 - protein, 16 aa, Homo sapiens
RSSQSLLHRNGFNYLD

SEQ ID NO: 16401 - protein, 16 aa, Homo sapiens
RSSQSLLHSDGNTYLS

SEQ ID NO: 16402 - protein, 16 aa, Homo sapiens
RSSQSLLHSDGYIYLD

SEQ ID NO: 16403 - protein, 16 aa, Homo sapiens
RSSQSLLHSDGYNYLD

SEQ ID NO: 16404 - protein, 16 aa, Homo sapiens
RSSQSLLHSNEYNYLD

SEQ ID NO: 16405 - protein, 16 aa, Homo sapiens
RSSQSLLHSNGHKYLD

SEQ ID NO: 16406 - protein, 16 aa, Homo sapiens
RSSQSLLHSNGHNYLD

SEQ ID NO: 16407 - protein, 16 aa, Homo sapiens
RSSQSLLHSNGIDYLD

SEQ ID NO: 16408 - protein, 16 aa, Homo sapiens
RSSQSLLHSNGYNYLD

SEQ ID NO: 16409 - protein, 16 aa, Homo sapiens
RSSQSLLHSNGYNYLN

SEQ ID NO: 16410 - protein, 16 aa, Homo sapiens
RSSQSLLHSYGYNYLD

SEQ ID NO: 16411 - protein, 16 aa, Homo sapiens
RSSQSLLHTDGKTYLS

SEQ ID NO: 16412 - protein, 16 aa, Homo sapiens
RSSQSLLHTNGYNYLA

SEQ ID NO: 16413 - protein, 16 aa, Homo sapiens
RSSQSLLNSNGYNYLN

SEQ ID NO: 16414 - protein, 16 aa, Homo sapiens
RSSQSLLYENGINYLD

SEQ ID NO: 16415 - protein, 16 aa, Homo sapiens
RSSQSLLYKDGNTYLS

SEQ ID NO: 16416 - protein, 17 aa, Homo sapiens
RSSQSLLYRSNKKNYLA

SEQ ID NO: 16417 - protein, 15 aa, Homo sapiens
RSSQSLQNIGYNYLD

SEQ ID NO: 16418 - protein, 16 aa, Homo sapiens
RSSQSLTLNDGNTYLH

SEQ ID NO: 16419 - protein, 16 aa, Homo sapiens
RSSQSLVHGDGNTYLS

SEQ ID NO: 16420 - protein, 16 aa, Homo sapiens
RSSQSLVHKDGNTYLN

SEQ ID NO: 16421 - protein, 16 aa, Homo sapiens
RSSQSLVHKTGNTFLS

SEQ ID NO: 16422 - protein, 16 aa, Homo sapiens
RSSQSLVHNDGNTYLN

SEQ ID NO: 16423 - protein, 16 aa, Homo sapiens
RSSQSLVHNNGNTYLN

SEQ ID NO: 16424 - protein, 16 aa, Homo sapiens
RSSQSLVHRDGNTYLN

SEQ ID NO: 16425 - protein, 16 aa, Homo sapiens
RSSQSLVHSDGDTYLN

SEQ ID NO: 16426 - protein, 16 aa, Homo sapiens
RSSQSLVHSDGGTYLS

SEQ ID NO: 16427 - protein, 16 aa, Homo sapiens
RSSQSLVHSDGNTYLN

SEQ ID NO: 16428 - protein, 16 aa, Homo sapiens
RSSQSLVHSDGNTYLS

SEQ ID NO: 16429 - protein, 16 aa, Homo sapiens
RSSQSLVHSDGNTYLT

SEQ ID NO: 16430 - protein, 17 aa, Homo sapiens
RSSQSLVHSNDGKTYLS

SEQ ID NO: 16431 - protein, 16 aa, Homo sapiens
RSSQSLVHSNGDTYLS

SEQ ID NO: 16432 - protein, 16 aa, Homo sapiens
RSSQSLVYIDGNTYLN

SEQ ID NO: 16433 - protein, 16 aa, Homo sapiens
RSSQSLVYKDGNTYLI

SEQ ID NO: 16434 - protein, 16 aa, Homo sapiens
RSSQSLVYKDGNTYLN

SEQ ID NO: 16435 - protein, 16 aa, Homo sapiens
RSSQSLVYNDGNTYLN

SEQ ID NO: 16436 - protein, 18 aa, Homo sapiens
RSSQSLVYSDGDGNTHLN

SEQ ID NO: 16437 - protein, 16 aa, Homo sapiens
RSSQSLVYSDGDTFLN

SEQ ID NO: 16438 - protein, 16 aa, Homo sapiens
RSSQSLVYSDGDTYLN

SEQ ID NO: 16439 - protein, 16 aa, Homo sapiens
RSSQSLVYSDGETYLN

SEQ ID NO: 16440 - protein, 16 aa, Homo sapiens
RSSQSLVYSDGKTYLN

SEQ ID NO: 16441 - protein, 16 aa, Homo sapiens
RSSQSLVYSDGNTYLN

SEQ ID NO: 16442 - protein, 16 aa, Homo sapiens
RSSQSLVYSDGNTYLS

SEQ ID NO: 16443 - protein, 16 aa, Homo sapiens
RSSQSLVYSDGSTHLF

SEQ ID NO: 16444 - protein, 16 aa, Homo sapiens
RSSQSLVYSGGNTFLH

SEQ ID NO: 16445 - protein, 16 aa, Homo sapiens
RSSQSLVYTDGNTFLN

SEQ ID NO: 16446 - protein, 16 aa, Homo sapiens
RSSQSLVYTNGNTYLN

SEQ ID NO: 16447 - protein, 17 aa, Homo sapiens
RSSQSVFFDSNGKNYLA

SEQ ID NO: 16448 - protein, 17 aa, Homo sapiens
RSSQSVFYDSNKKNYLA

SEQ ID NO: 16449 - protein, 17 aa, Homo sapiens
RSSQSVFYKSNKKNYFA

SEQ ID NO: 16450 - protein, 17 aa, Homo sapiens
RSSQSVFYNSNKKNYLA

SEQ ID NO: 16451 - protein, 17 aa, Homo sapiens
RSSQSVFYNSNRRNYLA

SEQ ID NO: 16452 - protein, 17 aa, Homo sapiens
RSSQSVFYSSNEKNYLA

SEQ ID NO: 16453 - protein, 11 aa, Homo sapiens
RSSQSVGTNLA

SEQ ID NO: 16454 - protein, 17 aa, Homo sapiens
RSSQSVLWNDNKKNYLA

SEQ ID NO: 16455 - protein, 15 aa, Homo sapiens
RSSQSVQNIGYNYLD

SEQ ID NO: 16456 - protein, 12 aa, Homo sapiens
RSSQSVRSSYLA

SEQ ID NO: 16457 - protein, 11 aa, Homo sapiens
RSSQSVSHHLA

SEQ ID NO: 16458 - protein, 11 aa, Homo sapiens
RSSQSVSSWLA

SEQ ID NO: 16459 - protein, 11 aa, Homo sapiens
RSSQSVYSNLA

SEQ ID NO: 16460 - protein, 11 aa, Homo sapiens
RSSQTITDHLA

SEQ ID NO: 16461 - protein, 16 aa, Homo sapiens
RSSQTLLHTNGKTYLY

SEQ ID NO: 16462 - protein, 16 aa, Homo sapiens
RSSRGLVHIDGNTYLT

SEQ ID NO: 16463 - protein, 16 aa, Homo sapiens
RSSRSLLDSNGYSYLD

SEQ ID NO: 16464 - protein, 16 aa, Homo sapiens
RSSRSLLHSNGYNHLD

SEQ ID NO: 16465 - protein, 16 aa, Homo sapiens
RSSRSLLHTNGYNYLA

SEQ ID NO: 16466 - protein, 16 aa, Homo sapiens
RSSRSLVHSDGNTYFN

SEQ ID NO: 16467 - protein, 16 aa, Homo sapiens
RSSRSLVHSDGNTYLN

SEQ ID NO: 16468 - protein, 8 aa, Homo sapiens
RSTDDMDV

SEQ ID NO: 16469 - protein, 9 aa, Homo sapiens
RSTDYNMDV

SEQ ID NO: 16470 - protein, 16 aa, Homo sapiens
RSTQSLLHSNGNNYVD

SEQ ID NO: 16471 - protein, 16 aa, Homo sapiens
RSTQSLVYSDGNTYLH

SEQ ID NO: 16472 - protein, 9 aa, Homo sapiens
RSTVAAGDY

SEQ ID NO: 16473 - protein, 5 aa, Homo sapiens
RSWMS

SEQ ID NO: 16474 - protein, 11 aa, Homo sapiens
RSYDGSLSGYV

SEQ ID NO: 16475 - protein, 5 aa, Homo sapiens
RSYMN

SEQ ID NO: 16476 - protein, 8 aa, Homo sapiens
RTDSGVDF

SEQ ID NO: 16477 - protein, 19 aa, Homo sapiens
RTGIKDNNYVAQYAASVKG

SEQ ID NO: 16478 - protein, 17 aa, Homo sapiens
RTNEDGSATHYVDSVRG

SEQ ID NO: 16479 - protein, 11 aa, Homo sapiens
RTSESVSSNLA

SEQ ID NO: 16480 - protein, 7 aa, Homo sapiens
RTSNRDS

SEQ ID NO: 16481 - protein, 11 aa, Homo sapiens
RTSQAIRKDLG

SEQ ID NO: 16482 - protein, 11 aa, Homo sapiens
RTSQAISSYLS

SEQ ID NO: 16483 - protein, 11 aa, Homo sapiens
RTSQGISSGFA

SEQ ID NO: 16484 - protein, 11 aa, Homo sapiens
RTSQHISSGIA

SEQ ID NO: 16485 - protein, 11 aa, Homo sapiens
RTSQNIYKYLN

SEQ ID NO: 16486 - protein, 11 aa, Homo sapiens
RTSQNIYTYLN

SEQ ID NO: 16487 - protein, 12 aa, Homo sapiens
RTSQRISSSSLN

SEQ ID NO: 16488 - protein, 10 aa, Homo sapiens
RTSQSFSSLA

SEQ ID NO: 16489 - protein, 12 aa, Homo sapiens
RTSQSIKNNNLA

SEQ ID NO: 16490 - protein, 11 aa, Homo sapiens
RTSQSISRYLN

SEQ ID NO: 16491 - protein, 12 aa, Homo sapiens
RTSQSISSTYLA

SEQ ID NO: 16492 - protein, 11 aa, Homo sapiens
RTSQSVSSHLA

SEQ ID NO: 16493 - protein, 11 aa, Homo sapiens
RTSQSVSSSLA

SEQ ID NO: 16494 - protein, 11 aa, Homo sapiens
RTSQVISSALA

SEQ ID NO: 16495 - protein, 8 aa, Homo sapiens
RTVDDMDV

SEQ ID NO: 16496 - protein, 18 aa, Homo sapiens
RTYYRFKWYSDSAVSVRS

SEQ ID NO: 16497 - protein, 18 aa, Homo sapiens
RTYYRSKWDNDYAVSVRG

SEQ ID NO: 16498 - protein, 18 aa, Homo sapiens
RTYYRSKWINDYAVSVRS

SEQ ID NO: 16499 - protein, 18 aa, Homo sapiens
RTYYRSKWYNDYAVSVKS

SEQ ID NO: 16500 - protein, 18 aa, Homo sapiens
RTYYRSKWYNEYAVSVES

SEQ ID NO: 16501 - protein, 18 aa, Homo sapiens
RTYYRSKWYTDYAVSVKS

SEQ ID NO: 16502 - protein, 16 aa, Homo sapiens
RTYYYDSSGYFNWFDP

SEQ ID NO: 16503 - protein, 17 aa, Homo sapiens
RVGPNGSGSYYPTYFDS

SEQ ID NO: 16504 - protein, 17 aa, Homo sapiens
RVIPIIGLANNAQKFEG

SEQ ID NO: 16505 - protein, 7 aa, Homo sapiens
RVNERPS

SEQ ID NO: 16506 - protein, 17 aa, Homo sapiens
RVNPKNGGTDYARKFQG

SEQ ID NO: 16507 - protein, 21 aa, Homo sapiens
RVPPEIYGVVPRWASNGYFDL

SEQ ID NO: 16508 - protein, 16 aa, Homo sapiens
RVSDRGSAHYSPSLKN

SEQ ID NO: 16509 - protein, 7 aa, Homo sapiens
RVSNRDA

SEQ ID NO: 16510 - protein, 7 aa, Homo sapiens
RVSNWDS

SEQ ID NO: 16511 - protein, 16 aa, Homo sapiens
RVYGNGITDYRSSLES

SEQ ID NO: 16512 - protein, 16 aa, Homo sapiens
RVYSNGRIKYNPSLES

SEQ ID NO: 16513 - protein, 16 aa, Homo sapiens
RVYSRGSTRYNPSLES

SEQ ID NO: 16514 - protein, 16 aa, Homo sapiens
RVYSSGNIKYNPSLES

SEQ ID NO: 16515 - protein, 13 aa, Homo sapiens
RWAVANFTQGFDP

SEQ ID NO: 16516 - protein, 5 aa, Homo sapiens
RYAIN

SEQ ID NO: 16517 - protein, 5 aa, Homo sapiens
RYAIS

SEQ ID NO: 16518 - protein, 5 aa, Homo sapiens
RYAMH

SEQ ID NO: 16519 - protein, 5 aa, Homo sapiens
RYAMK

SEQ ID NO: 16520 - protein, 5 aa, Homo sapiens
RYAMT

SEQ ID NO: 16521 - protein, 13 aa, Homo sapiens
RYCSGGHCYASDY

SEQ ID NO: 16522 - protein, 5 aa, Homo sapiens
RYEMN

SEQ ID NO: 16523 - protein, 18 aa, Homo sapiens
RYFDRTVYPRASSDYFDY

SEQ ID NO: 16524 - protein, 5 aa, Homo sapiens
RYGIS

SEQ ID NO: 16525 - protein, 5 aa, Homo sapiens
RYGIT

SEQ ID NO: 16526 - protein, 5 aa, Homo sapiens
RYGLT

SEQ ID NO: 16527 - protein, 5 aa, Homo sapiens
RYGMH

SEQ ID NO: 16528 - protein, 5 aa, Homo sapiens
RYGMK

SEQ ID NO: 16529 - protein, 5 aa, Homo sapiens
RYGMS

SEQ ID NO: 16530 - protein, 12 aa, Homo sapiens
RYHRYGDYAFDS

SEQ ID NO: 16531 - protein, 5 aa, Homo sapiens
RYPMN

SEQ ID NO: 16532 - protein, 12 aa, Homo sapiens
RYSENYNSAFDV

SEQ ID NO: 16533 - protein, 5 aa, Homo sapiens
RYSIS

SEQ ID NO: 16534 - protein, 5 aa, Homo sapiens
RYTFS

SEQ ID NO: 16535 - protein, 5 aa, Homo sapiens
RYTIN

SEQ ID NO: 16536 - protein, 5 aa, Homo sapiens
RYTIT

SEQ ID NO: 16537 - protein, 5 aa, Homo sapiens
RYTMH

SEQ ID NO: 16538 - protein, 5 aa, Homo sapiens
RYTMT

SEQ ID NO: 16539 - protein, 5 aa, Homo sapiens
RYVIN

SEQ ID NO: 16540 - protein, 5 aa, Homo sapiens
RYVMG

SEQ ID NO: 16541 - protein, 5 aa, Homo sapiens
RYWMH

SEQ ID NO: 16542 - protein, 5 aa, Homo sapiens
RYWMI

SEQ ID NO: 16543 - protein, 5 aa, Homo sapiens
RYWMN

SEQ ID NO: 16544 - protein, 5 aa, Homo sapiens
RYWMS

SEQ ID NO: 16545 - protein, 5 aa, Homo sapiens
RYWMT

SEQ ID NO: 16546 - protein, 5 aa, Homo sapiens
RYYVH

SEQ ID NO: 16547 - protein, 5 aa, Homo sapiens
RYYWN

SEQ ID NO: 16548 - protein, 14 aa, Homo sapiens
SAGGGDPKAGTFDF

SEQ ID NO: 16549 - protein, 7 aa, Homo sapiens
SAGQCWS

SEQ ID NO: 16550 - protein, 15 aa, Homo sapiens
SAGYYGSGKDNWFGP

SEQ ID NO: 16551 - protein, 7 aa, Homo sapiens
SAHYWDV

SEQ ID NO: 16552 - protein, 13 aa, Homo sapiens
SAHYYDVKSWFAP

SEQ ID NO: 16553 - protein, 7 aa, Homo sapiens
SARMGVS

SEQ ID NO: 16554 - protein, 7 aa, Homo sapiens
SASALQS

SEQ ID NO: 16555 - protein, 18 aa, Homo sapiens
SASHPLEMATISFDAFDI

SEQ ID NO: 16556 - protein, 7 aa, Homo sapiens
SASRLQS

SEQ ID NO: 16557 - protein, 7 aa, Homo sapiens
SASSLQG

SEQ ID NO: 16558 - protein, 7 aa, Homo sapiens
SASSLQS

SEQ ID NO: 16559 - protein, 13 aa, Homo sapiens
SASSSNIGDSHIS

SEQ ID NO: 16560 - protein, 7 aa, Homo sapiens
SASTFQS

SEQ ID NO: 16561 - protein, 7 aa, Homo sapiens
SASTLQS

SEQ ID NO: 16562 - protein, 7 aa, Homo sapiens
SASTRAA

SEQ ID NO: 16563 - protein, 7 aa, Homo sapiens
SASTRAT

SEQ ID NO: 16564 - protein, 11 aa, Homo sapiens
SAWDSSLSAWV

SEQ ID NO: 16565 - protein, 11 aa, Homo sapiens
SAWDSTLSAWV

SEQ ID NO: 16566 - protein, 11 aa, Homo sapiens
SAWDTSLNIYV

SEQ ID NO: 16567 - protein, 5 aa, Homo sapiens
SCAMH

SEQ ID NO: 16568 - protein, 5 aa, Homo sapiens
SCAMN

SEQ ID NO: 16569 - protein, 5 aa, Homo sapiens
SCGMH

SEQ ID NO: 16570 - protein, 5 aa, Homo sapiens
SDAIN

SEQ ID NO: 16571 - protein, 5 aa, Homo sapiens
SDAIS

SEQ ID NO: 16572 - protein, 5 aa, Homo sapiens
SDAMT

SEQ ID NO: 16573 - protein, 5 aa, Homo sapiens
SDAVS

SEQ ID NO: 16574 - protein, 7 aa, Homo sapiens
SDDRRPS

SEQ ID NO: 16575 - protein, 7 aa, Homo sapiens
SDDYYWS

SEQ ID NO: 16576 - protein, 94 aa, Homo sapiens
SDELTQPPSASVSPGQTARITCSGDALPKQYAYWYQQKSGQAPVLVIYKGSERPSGIPERFSGSSSGTTVTLTISGVQAEDEGDYYCQSTDTRG

SEQ ID NO: 16577 - protein, 107 aa, Homo sapiens
SDELTQPPSASVSPGQTARITCSGDALPKQYAYWYQQKSGQAPVLVIYKGSERPSGIPERFSGSSSGTTVTLTISGVQAEDEGDYYCQSTDTRGIVVFGGGTKLTVL

SEQ ID NO: 16578 - protein, 93 aa, Homo sapiens
SDELTQPSAVSVSPGQTARITCSGDVLAKKYARWFQQKAGQAPVLVIYKDTERPSGIPDRFSGSSSGTTVTLTITGAQVEDEADYYCYSAADN

SEQ ID NO: 16579 - protein, 107 aa, Homo sapiens
SDELTQPSAVSVSPGQTARITCSGDVLAKKYARWFQQKAGQAPVLVIYKDTERPSGIPDRFSGSSSGTTVTLTITGAQVEDEADYYCYSAADNSRRVFGGGTKLTVL

SEQ ID NO: 16580 - protein, 12 aa, Homo sapiens
SDGGYDREFFDY

SEQ ID NO: 16581 - protein, 7 aa, Homo sapiens
SDGYSCS

SEQ ID NO: 16582 - protein, 5 aa, Homo sapiens
SDHFH

SEQ ID NO: 16583 - protein, 14 aa, Homo sapiens
SDMYHHGSGSGITY

SEQ ID NO: 16584 - protein, 7 aa, Homo sapiens
SDNKRPS

SEQ ID NO: 16585 - protein, 7 aa, Homo sapiens
SDNQRPS

SEQ ID NO: 16586 - protein, 7 aa, Homo sapiens
SDNQRRS

SEQ ID NO: 16587 - protein, 7 aa, Homo sapiens
SDNRRPS

SEQ ID NO: 16588 - protein, 6 aa, Homo sapiens
SDNWWT

SEQ ID NO: 16589 - protein, 14 aa, Homo sapiens
SDRYYYDSGSGVTD

SEQ ID NO: 16590 - protein, 13 aa, Homo sapiens
SDSGNYYHPLLDY

SEQ ID NO: 16591 - protein, 5 aa, Homo sapiens
SDSMN

SEQ ID NO: 16592 - protein, 7 aa, Homo sapiens
SDSSYWG

SEQ ID NO: 16593 - protein, 7 aa, Homo sapiens
SDSVAWN

SEQ ID NO: 16594 - protein, 5 aa, Homo sapiens
SDSVT

SEQ ID NO: 16595 - protein, 5 aa, Homo sapiens
SDSWA

SEQ ID NO: 16596 - protein, 7 aa, Homo sapiens
SDTYSWS

SEQ ID NO: 16597 - protein, 5 aa, Homo sapiens
SDVMH

SEQ ID NO: 16598 - protein, 5 aa, Homo sapiens
SDWIG

SEQ ID NO: 16599 - protein, 12 aa, Homo sapiens
SDYAVFYYGMDV

SEQ ID NO: 16600 - protein, 15 aa, Homo sapiens
SDYEVRYYYYYGMDV

SEQ ID NO: 16601 - protein, 12 aa, Homo sapiens
SDYGDYDDAFDI

SEQ ID NO: 16602 - protein, 5 aa, Homo sapiens
SDYMN

SEQ ID NO: 16603 - protein, 5 aa, Homo sapiens
SDYWS

SEQ ID NO: 16604 - protein, 10 aa, Homo sapiens
SDYYDIPVDS

SEQ ID NO: 16605 - protein, 6 aa, Homo sapiens
SDYYWA

SEQ ID NO: 16606 - protein, 15 aa, Homo sapiens
SEARGYIFMVPDGDS

SEQ ID NO: 16607 - protein, 12 aa, Homo sapiens
SEGDYELFGLVT

SEQ ID NO: 16608 - protein, 5 aa, Homo sapiens
SFAFS

SEQ ID NO: 16609 - protein, 17 aa, Homo sapiens
SFAGDTGNIYYADSVKG

SEQ ID NO: 16610 - protein, 5 aa, Homo sapiens
SFAIS

SEQ ID NO: 16611 - protein, 5 aa, Homo sapiens
SFAVN

SEQ ID NO: 16612 - protein, 17 aa, Homo sapiens
SFDPEDGEALFAQRFQG

SEQ ID NO: 16613 - protein, 17 aa, Homo sapiens
SFDRKHGETINAQKFQG

SEQ ID NO: 16614 - protein, 94 aa, Homo sapiens
SFEPTQPPSLSVSPGQTASITCSGHQLGNKYLCWYQQKPGQSPVLVMYQDTKRPSGIPERFSGSSSGNTATLTISGTQPMDEAVYYCQAWDGST

SEQ ID NO: 16615 - protein, 106 aa, Homo sapiens
SFEPTQPPSLSVSPGQTASITCSGHQLGNKYLCWYQQKPGQSPVLVMYQDTKRPSGIPERFSGSSSGNTATLTISGTQPMDEAVYYCQAWDGSTVVFGGGTKLTVL

SEQ ID NO: 16616 - protein, 9 aa, Homo sapiens
SFFADPLDL

SEQ ID NO: 16617 - protein, 5 aa, Homo sapiens
SFGFT

SEQ ID NO: 16618 - protein, 5 aa, Homo sapiens
SFGIS

SEQ ID NO: 16619 - protein, 5 aa, Homo sapiens
SFGMH

SEQ ID NO: 16620 - protein, 5 aa, Homo sapiens
SFGMN

SEQ ID NO: 16621 - protein, 5 aa, Homo sapiens
SFHIS

SEQ ID NO: 16622 - protein, 14 aa, Homo sapiens
SFLVAVADFYYFDY

SEQ ID NO: 16623 - protein, 18 aa, Homo sapiens
SFRLAGIAAADGIGIIDY

SEQ ID NO: 16624 - protein, 5 aa, Homo sapiens
SFSMH

SEQ ID NO: 16625 - protein, 8 aa, Homo sapiens
SFSRYPIT

SEQ ID NO: 16626 - protein, 9 aa, Homo sapiens
SFSSGFGDN

SEQ ID NO: 16627 - protein, 16 aa, Homo sapiens
SFTGTMSTYYADSVKG

SEQ ID NO: 16628 - protein, 96 aa, Homo sapiens
SFVLTQPPSVSVAPGQTARISCGGDIIGSRAVHWYQQKPGQAPVLVVYDNNDRPSGIPERFYGSTSGNTATLTISRVEAGDEAAYYCQVWVSSSHH

SEQ ID NO: 16629 - protein, 108 aa, Homo sapiens
SFVLTQPPSVSVAPGQTARISCGGDIIGSRAVHWYQQKPGQAPVLVVYDNNDRPSGIPERFYGSTSGNTATLTISRVEAGDEAAYYCQVWVSSSHHVVFGGGTELTVL

SEQ ID NO: 16630 - protein, 5 aa, Homo sapiens
SFVMF

SEQ ID NO: 16631 - protein, 5 aa, Homo sapiens
SFWMS

SEQ ID NO: 16632 - protein, 5 aa, Homo sapiens
SFYMH

SEQ ID NO: 16633 - protein, 5 aa, Homo sapiens
SFYWS

SEQ ID NO: 16634 - protein, 14 aa, Homo sapiens
SGAGSYRNSQAFDY

SEQ ID NO: 16635 - protein, 14 aa, Homo sapiens
SGAGTYRNSQAFDY

SEQ ID NO: 16636 - protein, 13 aa, Homo sapiens
SGATSNIGDNYVS

SEQ ID NO: 16637 - protein, 11 aa, Homo sapiens
SGDAFPKLYAY

SEQ ID NO: 16638 - protein, 11 aa, Homo sapiens
SGDALANNYAY

SEQ ID NO: 16639 - protein, 11 aa, Homo sapiens
SGDALPHQFAY

SEQ ID NO: 16640 - protein, 11 aa, Homo sapiens
SGDALPKKYAY

SEQ ID NO: 16641 - protein, 11 aa, Homo sapiens
SGDALPKQFAY

SEQ ID NO: 16642 - protein, 11 aa, Homo sapiens
SGDALPKQYAY

SEQ ID NO: 16643 - protein, 11 aa, Homo sapiens
SGDALPMKYAY

SEQ ID NO: 16644 - protein, 11 aa, Homo sapiens
SGDALPNQYAN

SEQ ID NO: 16645 - protein, 11 aa, Homo sapiens
SGDALPNQYAS

SEQ ID NO: 16646 - protein, 11 aa, Homo sapiens
SGDALPNQYAY

SEQ ID NO: 16647 - protein, 11 aa, Homo sapiens
SGDALPRQYTY

SEQ ID NO: 16648 - protein, 11 aa, Homo sapiens
SGDALPYKYAY

SEQ ID NO: 16649 - protein, 11 aa, Homo sapiens
SGDALSKQYAY

SEQ ID NO: 16650 - protein, 11 aa, Homo sapiens
SGDALSKRYAS

SEQ ID NO: 16651 - protein, 11 aa, Homo sapiens
SGDALSRQHAH

SEQ ID NO: 16652 - protein, 11 aa, Homo sapiens
SGDELGHKYAS

SEQ ID NO: 16653 - protein, 11 aa, Homo sapiens
SGDILAKKYAR

SEQ ID NO: 16654 - protein, 11 aa, Homo sapiens
SGDILGDKYTC

SEQ ID NO: 16655 - protein, 11 aa, Homo sapiens
SGDILTKEYAY

SEQ ID NO: 16656 - protein, 11 aa, Homo sapiens
SGDILTKKYAR

SEQ ID NO: 16657 - protein, 11 aa, Homo sapiens
SGDKLEDKFVC

SEQ ID NO: 16658 - protein, 11 aa, Homo sapiens
SGDKLGDKFAC

SEQ ID NO: 16659 - protein, 11 aa, Homo sapiens
SGDKLGDKYAC

SEQ ID NO: 16660 - protein, 11 aa, Homo sapiens
SGDKLGDKYAS

SEQ ID NO: 16661 - protein, 11 aa, Homo sapiens
SGDKLGDKYTC

SEQ ID NO: 16662 - protein, 11 aa, Homo sapiens
SGDKLGSEYVS

SEQ ID NO: 16663 - protein, 11 aa, Homo sapiens
SGDLLAKKYAR

SEQ ID NO: 16664 - protein, 11 aa, Homo sapiens
SGDLLTNKYAR

SEQ ID NO: 16665 - protein, 11 aa, Homo sapiens
SGDNLGDKYAC

SEQ ID NO: 16666 - protein, 11 aa, Homo sapiens
SGDNLSDTYVS

SEQ ID NO: 16667 - protein, 11 aa, Homo sapiens
SGDQLGDKYAS

SEQ ID NO: 16668 - protein, 11 aa, Homo sapiens
SGDRLGDKYTC

SEQ ID NO: 16669 - protein, 11 aa, Homo sapiens
SGDTLGRNYAS

SEQ ID NO: 16670 - protein, 11 aa, Homo sapiens
SGDTLPNQFAY

SEQ ID NO: 16671 - protein, 11 aa, Homo sapiens
SGDVLAKKYAR

SEQ ID NO: 16672 - protein, 11 aa, Homo sapiens
SGDVLTKRYPR

SEQ ID NO: 16673 - protein, 7 aa, Homo sapiens
SGDYYWS

SEQ ID NO: 16674 - protein, 11 aa, Homo sapiens
SGEKLGEKYCS

SEQ ID NO: 16675 - protein, 11 aa, Homo sapiens
SGEKLGEKYTC

SEQ ID NO: 16676 - protein, 11 aa, Homo sapiens
SGEKLGVKYAS

SEQ ID NO: 16677 - protein, 7 aa, Homo sapiens
SGFNRAS

SEQ ID NO: 16678 - protein, 6 aa, Homo sapiens
SGFYWD

SEQ ID NO: 16679 - protein, 12 aa, Homo sapiens
SGGLYQPAYFDP

SEQ ID NO: 16680 - protein, 7 aa, Homo sapiens
SGGNFWN

SEQ ID NO: 16681 - protein, 7 aa, Homo sapiens
SGGQCWS

SEQ ID NO: 16682 - protein, 8 aa, Homo sapiens
SGGRENDY

SEQ ID NO: 16683 - protein, 13 aa, Homo sapiens
SGGSSNIETNFVY

SEQ ID NO: 16684 - protein, 13 aa, Homo sapiens
SGGSSNIGSNTVN

SEQ ID NO: 16685 - protein, 13 aa, Homo sapiens
SGGSSNIGTNIVN

SEQ ID NO: 16686 - protein, 7 aa, Homo sapiens
SGGSSWS

SEQ ID NO: 16687 - protein, 13 aa, Homo sapiens
SGGTSNIGRNFVY

SEQ ID NO: 16688 - protein, 13 aa, Homo sapiens
SGGYDILTDGFDY

SEQ ID NO: 16689 - protein, 7 aa, Homo sapiens
SGGYSCS

SEQ ID NO: 16690 - protein, 7 aa, Homo sapiens
SGGYSWS

SEQ ID NO: 16691 - protein, 18 aa, Homo sapiens
SGGYSYGGDELYYYGMDV

SEQ ID NO: 16692 - protein, 7 aa, Homo sapiens
SGGYYWS

SEQ ID NO: 16693 - protein, 11 aa, Homo sapiens
SGHKLGDKYAS

SEQ ID NO: 16694 - protein, 11 aa, Homo sapiens
SGHQLGNKYLC

SEQ ID NO: 16695 - protein, 7 aa, Homo sapiens
SGHYHWS

SEQ ID NO: 16696 - protein, 6 aa, Homo sapiens
SGHYWG

SEQ ID NO: 16697 - protein, 12 aa, Homo sapiens
SGITAQTNWFDP

SEQ ID NO: 16698 - protein, 13 aa, Homo sapiens
SGNSDNVGSYAVG

SEQ ID NO: 16699 - protein, 13 aa, Homo sapiens
SGNSSNIGSNYVF

SEQ ID NO: 16700 - protein, 11 aa, Homo sapiens
SGNVLAKKYAR

SEQ ID NO: 16701 - protein, 7 aa, Homo sapiens
SGNYYWG

SEQ ID NO: 16702 - protein, 7 aa, Homo sapiens
SGNYYWS

SEQ ID NO: 16703 - protein, 22 aa, Homo sapiens
SGPGRITMVRGVIAPIFDWFDP

SEQ ID NO: 16704 - protein, 14 aa, Homo sapiens
SGQSYNFWSGYFDY

SEQ ID NO: 16705 - protein, 12 aa, Homo sapiens
SGRLSPVHWFDP

SEQ ID NO: 16706 - protein, 13 aa, Homo sapiens
SGRNSNIGNNLVN

SEQ ID NO: 16707 - protein, 7 aa, Homo sapiens
SGRYYWG

SEQ ID NO: 16708 - protein, 13 aa, Homo sapiens
SGSDSNIGSNSVC

SEQ ID NO: 16709 - protein, 13 aa, Homo sapiens
SGSDSNIGSNYVY

SEQ ID NO: 16710 - protein, 13 aa, Homo sapiens
SGSGSNIGSNPVN

SEQ ID NO: 16711 - protein, 13 aa, Homo sapiens
SGSGSTIGSNTVN

SEQ ID NO: 16712 - protein, 13 aa, Homo sapiens
SGSKSNFGRNTAN

SEQ ID NO: 16713 - protein, 7 aa, Homo sapiens
SGSNCWG

SEQ ID NO: 16714 - protein, 13 aa, Homo sapiens
SGSNSNIGRNTVN

SEQ ID NO: 16715 - protein, 13 aa, Homo sapiens
SGSNSNIGSDYVY

SEQ ID NO: 16716 - protein, 13 aa, Homo sapiens
SGSNSNIGSNFVS

SEQ ID NO: 16717 - protein, 13 aa, Homo sapiens
SGSNSNIGSNTVN

SEQ ID NO: 16718 - protein, 13 aa, Homo sapiens
SGSRSNIGGSTVN

SEQ ID NO: 16719 - protein, 13 aa, Homo sapiens
SGSRSNIGSNPVS

SEQ ID NO: 16720 - protein, 13 aa, Homo sapiens
SGSRSNIGSNTVN

SEQ ID NO: 16721 - protein, 13 aa, Homo sapiens
SGSSFNIGNNYVS

SEQ ID NO: 16722 - protein, 13 aa, Homo sapiens
SGSSPNIGSNTVI

SEQ ID NO: 16723 - protein, 13 aa, Homo sapiens
SGSSSDIGNNYVY

SEQ ID NO: 16724 - protein, 13 aa, Homo sapiens
SGSSSNIEDNTVS

SEQ ID NO: 16725 - protein, 13 aa, Homo sapiens
SGSSSNIEKDYVC

SEQ ID NO: 16726 - protein, 13 aa, Homo sapiens
SGSSSNIESNTVN

SEQ ID NO: 16727 - protein, 13 aa, Homo sapiens
SGSSSNIGADYVS

SEQ ID NO: 16728 - protein, 13 aa, Homo sapiens
SGSSSNIGGNYVS

SEQ ID NO: 16729 - protein, 13 aa, Homo sapiens
SGSSSNIGINTVN

SEQ ID NO: 16730 - protein, 13 aa, Homo sapiens
SGSSSNIGKNIVN

SEQ ID NO: 16731 - protein, 13 aa, Homo sapiens
SGSSSNIGKNYVS

SEQ ID NO: 16732 - protein, 13 aa, Homo sapiens
SGSSSNIGNMYVS

SEQ ID NO: 16733 - protein, 13 aa, Homo sapiens
SGSSSNIGNNAVN

SEQ ID NO: 16734 - protein, 13 aa, Homo sapiens
SGSSSNIGNNFVS

SEQ ID NO: 16735 - protein, 13 aa, Homo sapiens
SGSSSNIGNNPVN

SEQ ID NO: 16736 - protein, 13 aa, Homo sapiens
SGSSSNIGNNYVS

SEQ ID NO: 16737 - protein, 13 aa, Homo sapiens
SGSSSNIGNNYVY

SEQ ID NO: 16738 - protein, 13 aa, Homo sapiens
SGSSSNIGRNHVS

SEQ ID NO: 16739 - protein, 13 aa, Homo sapiens
SGSSSNIGRNIVN

SEQ ID NO: 16740 - protein, 13 aa, Homo sapiens
SGSSSNIGRNTVS

SEQ ID NO: 16741 - protein, 13 aa, Homo sapiens
SGSSSNIGRNYVY

SEQ ID NO: 16742 - protein, 13 aa, Homo sapiens
SGSSSNIGSHTVN

SEQ ID NO: 16743 - protein, 13 aa, Homo sapiens
SGSSSNIGSNPVN

SEQ ID NO: 16744 - protein, 13 aa, Homo sapiens
SGSSSNIGSNSVN

SEQ ID NO: 16745 - protein, 13 aa, Homo sapiens
SGSSSNIGSNTVI

SEQ ID NO: 16746 - protein, 13 aa, Homo sapiens
SGSSSNIGSNTVN

SEQ ID NO: 16747 - protein, 13 aa, Homo sapiens
SGSSSNIGSNTVN

SEQ ID NO: 16748 - protein, 13 aa, Homo sapiens
SGSSSNIGSNTVN

SEQ ID NO: 16749 - protein, 13 aa, Homo sapiens
SGSSSNIGSNTVN

SEQ ID NO: 16750 - protein, 13 aa, Homo sapiens
SGSSSNIGSNTVN

SEQ ID NO: 16751 - protein, 13 aa, Homo sapiens
SGSSSNIGSNTVN

SEQ ID NO: 16752 - protein, 13 aa, Homo sapiens
SGSSSNIGSNTVN

SEQ ID NO: 16753 - protein, 13 aa, Homo sapiens
SGSSSNIGSNTVN

SEQ ID NO: 16754 - protein, 13 aa, Homo sapiens
SGSSSNIGSNTVN

SEQ ID NO: 16755 - protein, 13 aa, Homo sapiens
SGSSSNIGSNTVN

SEQ ID NO: 16756 - protein, 13 aa, Homo sapiens
SGSSSNIGSNTVN

SEQ ID NO: 16757 - protein, 13 aa, Homo sapiens
SGSSSNIGSNTVN

SEQ ID NO: 16758 - protein, 13 aa, Homo sapiens
SGSSSNIGSNTVS

SEQ ID NO: 16759 - protein, 13 aa, Homo sapiens
SGSSSNIGSNYVY

SEQ ID NO: 16760 - protein, 13 aa, Homo sapiens
SGSSSNIGSRAVN

SEQ ID NO: 16761 - protein, 13 aa, Homo sapiens
SGSSSNIGSSSVH

SEQ ID NO: 16762 - protein, 13 aa, Homo sapiens
SGSSSNIGSSTVL

SEQ ID NO: 16763 - protein, 13 aa, Homo sapiens
SGSSSNIGSYSGN

SEQ ID NO: 16764 - protein, 13 aa, Homo sapiens
SGSSSNIGTNNVY

SEQ ID NO: 16765 - protein, 13 aa, Homo sapiens
SGSSSNIGTNTVN

SEQ ID NO: 16766 - protein, 13 aa, Homo sapiens
SGSSSNIGTSTVH

SEQ ID NO: 16767 - protein, 13 aa, Homo sapiens
SGSSSNIGVNTVS

SEQ ID NO: 16768 - protein, 13 aa, Homo sapiens
SGSSSNMGKNNVN

SEQ ID NO: 16769 - protein, 7 aa, Homo sapiens
SGSSYWG

SEQ ID NO: 16770 - protein, 13 aa, Homo sapiens
SGSTSNIGKNIVN

SEQ ID NO: 16771 - protein, 13 aa, Homo sapiens
SGSTSNIGNNYVS

SEQ ID NO: 16772 - protein, 13 aa, Homo sapiens
SGSTSNIGSNYVY

SEQ ID NO: 16773 - protein, 13 aa, Homo sapiens
SGSTSNMGGKTFN

SEQ ID NO: 16774 - protein, 13 aa, Homo sapiens
SGSTYNIGYNYVS

SEQ ID NO: 16775 - protein, 11 aa, Homo sapiens
SGSYADNWFDP

SEQ ID NO: 16776 - protein, 12 aa, Homo sapiens
SGSYHLASPLSS

SEQ ID NO: 16777 - protein, 7 aa, Homo sapiens
SGSYSWS

SEQ ID NO: 16778 - protein, 7 aa, Homo sapiens
SGSYYWG

SEQ ID NO: 16779 - protein, 7 aa, Homo sapiens
SGSYYWS

SEQ ID NO: 16780 - protein, 14 aa, Homo sapiens
SGTSGDVGAYNYVS

SEQ ID NO: 16781 - protein, 14 aa, Homo sapiens
SGTSSDVGGYNYVS

SEQ ID NO: 16782 - protein, 14 aa, Homo sapiens
SGTSSDVGNYNYIS

SEQ ID NO: 16783 - protein, 13 aa, Homo sapiens
SGTSSNIGSNHVY

SEQ ID NO: 16784 - protein, 7 aa, Homo sapiens
SGTYDWS

SEQ ID NO: 16785 - protein, 7 aa, Homo sapiens
SGTYYWG

SEQ ID NO: 16786 - protein, 7 aa, Homo sapiens
SGTYYWS

SEQ ID NO: 16787 - protein, 12 aa, Homo sapiens
SGVRGVPRDMDV

SEQ ID NO: 16788 - protein, 18 aa, Homo sapiens
SGWAYEEGSWVYDYNMDV

SEQ ID NO: 16789 - protein, 16 aa, Homo sapiens
SGYDLGSFYYYYGMDV

SEQ ID NO: 16790 - protein, 6 aa, Homo sapiens
SGYFWG

SEQ ID NO: 16791 - protein, 6 aa, Homo sapiens
SGYFWV

SEQ ID NO: 16792 - protein, 14 aa, Homo sapiens
SGYSIVGTPGAFDI

SEQ ID NO: 16793 - protein, 6 aa, Homo sapiens
SGYYLA

SEQ ID NO: 16794 - protein, 6 aa, Homo sapiens
SGYYLG

SEQ ID NO: 16795 - protein, 6 aa, Homo sapiens
SGYYWA

SEQ ID NO: 16796 - protein, 6 aa, Homo sapiens
SGYYWG

SEQ ID NO: 16797 - protein, 5 aa, Homo sapiens
SHAFH

SEQ ID NO: 16798 - protein, 5 aa, Homo sapiens
SHAFT

SEQ ID NO: 16799 - protein, 5 aa, Homo sapiens
SHAIN

SEQ ID NO: 16800 - protein, 5 aa, Homo sapiens
SHAIS

SEQ ID NO: 16801 - protein, 5 aa, Homo sapiens
SHAIT

SEQ ID NO: 16802 - protein, 5 aa, Homo sapiens
SHALS

SEQ ID NO: 16803 - protein, 5 aa, Homo sapiens
SHAMN

SEQ ID NO: 16804 - protein, 5 aa, Homo sapiens
SHAMT

SEQ ID NO: 16805 - protein, 5 aa, Homo sapiens
SHAVT

SEQ ID NO: 16806 - protein, 5 aa, Homo sapiens
SHDWS

SEQ ID NO: 16807 - protein, 95 aa, Homo sapiens
SHELTQPPSVSVSPGQTARITCSGDALSKRYASWCQQKPGQAPVAVIYKDSERPSGIPERFSGSSSGTTVTLTITGVQAEDEAEYYCQSADSSDS

SEQ ID NO: 16808 - protein, 108 aa, Homo sapiens
SHELTQPPSVSVSPGQTARITCSGDALSKRYASWCQQKPGQAPVAVIYKDSERPSGIPERFSGSSSGTTVTLTITGVQAEDEAEYYCQSADSSDSFVLFGGGTKLTVL

SEQ ID NO: 16809 - protein, 5 aa, Homo sapiens
SHGIS

SEQ ID NO: 16810 - protein, 5 aa, Homo sapiens
SHGMS

SEQ ID NO: 16811 - protein, 13 aa, Homo sapiens
SHGSGYGTDYLGY

SEQ ID NO: 16812 - protein, 13 aa, Homo sapiens
SHLGTVGMGAFNI

SEQ ID NO: 16813 - protein, 5 aa, Homo sapiens
SHNMN

SEQ ID NO: 16814 - protein, 14 aa, Homo sapiens
SHSSEDSAYRPSSV

SEQ ID NO: 16815 - protein, 14 aa, Homo sapiens
SHSTTYYKGYYFEY

SEQ ID NO: 16816 - protein, 5 aa, Homo sapiens
SHWIA

SEQ ID NO: 16817 - protein, 5 aa, Homo sapiens
SHWIG

SEQ ID NO: 16818 - protein, 5 aa, Homo sapiens
SHWMH

SEQ ID NO: 16819 - protein, 5 aa, Homo sapiens
SHWMS

SEQ ID NO: 16820 - protein, 11 aa, Homo sapiens
SHYGDYPCADY

SEQ ID NO: 16821 - protein, 5 aa, Homo sapiens
SHYWN

SEQ ID NO: 16822 - protein, 5 aa, Homo sapiens
SHYWS

SEQ ID NO: 16823 - protein, 5 aa, Homo sapiens
SHYWT

SEQ ID NO: 16824 - protein, 16 aa, Homo sapiens
SICSNGSTYYNPSLKS

SEQ ID NO: 16825 - protein, 16 aa, Homo sapiens
SIDHSGHTYNNPSLES

SEQ ID NO: 16826 - protein, 16 aa, Homo sapiens
SIDYSGRTYYNPSLKS

SEQ ID NO: 16827 - protein, 17 aa, Homo sapiens
SIFHSGTTSYYNPSLKS

SEQ ID NO: 16828 - protein, 16 aa, Homo sapiens
SIFYRKSNHYNESLRS

SEQ ID NO: 16829 - protein, 16 aa, Homo sapiens
SIFYTGSTNYKPSLSS

SEQ ID NO: 16830 - protein, 17 aa, Homo sapiens
SIGTSAGYISYAGSVKG

SEQ ID NO: 16831 - protein, 16 aa, Homo sapiens
SIHYSGKTYYNPSLKS

SEQ ID NO: 16832 - protein, 16 aa, Homo sapiens
SIHYSGSTYYNPSLKS

SEQ ID NO: 16833 - protein, 17 aa, Homo sapiens
SIIAGGVSTYYADSVKG

SEQ ID NO: 16834 - protein, 17 aa, Homo sapiens
SIIGGGVSTYYADSVKG

SEQ ID NO: 16835 - protein, 17 aa, Homo sapiens
SIIPMFGTTNYAQRFQG

SEQ ID NO: 16836 - protein, 17 aa, Homo sapiens
SIKEDESEKNYVDSVKG

SEQ ID NO: 16837 - protein, 17 aa, Homo sapiens
SIKEDGREKSYVASVEG

SEQ ID NO: 16838 - protein, 17 aa, Homo sapiens
SIKEDGRQKYYVDSVKG

SEQ ID NO: 16839 - protein, 17 aa, Homo sapiens
SIKEDGSEKHYVDSVKG

SEQ ID NO: 16840 - protein, 17 aa, Homo sapiens
SIKEDGSEKNYVDSVKG

SEQ ID NO: 16841 - protein, 17 aa, Homo sapiens
SIKEDGSEKYYGDSVKG

SEQ ID NO: 16842 - protein, 17 aa, Homo sapiens
SIKHDGSEEKYVDSVKG

SEQ ID NO: 16843 - protein, 17 aa, Homo sapiens
SIKKDGSEKYYVKSVKG

SEQ ID NO: 16844 - protein, 17 aa, Homo sapiens
SIKQDGSEEKYVDSVKG

SEQ ID NO: 16845 - protein, 17 aa, Homo sapiens
SIKQDGSEKKYVDSVRG

SEQ ID NO: 16846 - protein, 17 aa, Homo sapiens
SIKQDGSEKQYGGSVKG

SEQ ID NO: 16847 - protein, 17 aa, Homo sapiens
SIKQDGSEKYYVDSVKG

SEQ ID NO: 16848 - protein, 17 aa, Homo sapiens
SIKQDGSETNYVDSVKG

SEQ ID NO: 16849 - protein, 17 aa, Homo sapiens
SIKQDGSQRHYVDSVEG

SEQ ID NO: 16850 - protein, 17 aa, Homo sapiens
SINKDGSKVYYVDSVKG

SEQ ID NO: 16851 - protein, 7 aa, Homo sapiens
SINKRPS

SEQ ID NO: 16852 - protein, 16 aa, Homo sapiens
SINTAGETFYPASVKG

SEQ ID NO: 16853 - protein, 17 aa, Homo sapiens
SINWNTISIGYADSVKG

SEQ ID NO: 16854 - protein, 16 aa, Homo sapiens
SINYNGNAYYNPSLKS

SEQ ID NO: 16855 - protein, 17 aa, Homo sapiens
SIQGSGDGTYDADSVKG

SEQ ID NO: 16856 - protein, 17 aa, Homo sapiens
SIRDSGISRYYTDSVKG

SEQ ID NO: 16857 - protein, 17 aa, Homo sapiens
SIRFTDGTTYYAGSVEG

SEQ ID NO: 16858 - protein, 17 aa, Homo sapiens
SIRGSGISTYYADSVKG

SEQ ID NO: 16859 - protein, 17 aa, Homo sapiens
SIRGSGTETHYTDSVKG

SEQ ID NO: 16860 - protein, 17 aa, Homo sapiens
SIRRGGDKIYYADSLKG

SEQ ID NO: 16861 - protein, 17 aa, Homo sapiens
SIRRNGDKAYYADSVKG

SEQ ID NO: 16862 - protein, 19 aa, Homo sapiens
SIRSKAQGYTIEYAASVKG

SEQ ID NO: 16863 - protein, 17 aa, Homo sapiens
SIRSYAGFISYTDSVKG

SEQ ID NO: 16864 - protein, 7 aa, Homo sapiens
SIRYFWA

SEQ ID NO: 16865 - protein, 17 aa, Homo sapiens
SISASGGSTYYADSVKG

SEQ ID NO: 16866 - protein, 17 aa, Homo sapiens
SISASGISTYYADSVKG

SEQ ID NO: 16867 - protein, 17 aa, Homo sapiens
SISATAGSTYYAESVKG

SEQ ID NO: 16868 - protein, 17 aa, Homo sapiens
SISATGISTYYADSVKG

SEQ ID NO: 16869 - protein, 17 aa, Homo sapiens
SISATGLSTYYIDSVKG

SEQ ID NO: 16870 - protein, 17 aa, Homo sapiens
SISATGLSTYYTDSVKG

SEQ ID NO: 16871 - protein, 17 aa, Homo sapiens
SISDSGGSAHYTDSVKG

SEQ ID NO: 16872 - protein, 17 aa, Homo sapiens
SISDSGGSTYYAESVQG

SEQ ID NO: 16873 - protein, 17 aa, Homo sapiens
SISEDGDVKKYVDSVKG

SEQ ID NO: 16874 - protein, 16 aa, Homo sapiens
SISFSGTTHYSPSLES

SEQ ID NO: 16875 - protein, 17 aa, Homo sapiens
SISGDTNYIYYADSVKG

SEQ ID NO: 16876 - protein, 16 aa, Homo sapiens
SISGGGTTHYADSVMG

SEQ ID NO: 16877 - protein, 18 aa, Homo sapiens
SISGHRDANTYYAESVKG

SEQ ID NO: 16878 - protein, 17 aa, Homo sapiens
SISGNDGATYYGDSVKG

SEQ ID NO: 16879 - protein, 18 aa, Homo sapiens
SISGNPNANRYYADSVKG

SEQ ID NO: 16880 - protein, 18 aa, Homo sapiens
SISGNRDANTYYADSVKG

SEQ ID NO: 16881 - protein, 17 aa, Homo sapiens
SISGRSDATYYADSVKG

SEQ ID NO: 16882 - protein, 17 aa, Homo sapiens
SISGSAGSAYYADSVKG

SEQ ID NO: 16883 - protein, 17 aa, Homo sapiens
SISGSDTKTYYAGAVKG

SEQ ID NO: 16884 - protein, 17 aa, Homo sapiens
SISGSGDTKYYADSVKG

SEQ ID NO: 16885 - protein, 17 aa, Homo sapiens
SISGSGFSRYYADSVKG

SEQ ID NO: 16886 - protein, 17 aa, Homo sapiens
SISGSGGSAYYADSVRG

SEQ ID NO: 16887 - protein, 17 aa, Homo sapiens
SISGSGGSRYYADSVKG

SEQ ID NO: 16888 - protein, 17 aa, Homo sapiens
SISGSGGSTYYADSVKG

SEQ ID NO: 16889 - protein, 17 aa, Homo sapiens
SISGSGISKYYADSVKG

SEQ ID NO: 16890 - protein, 17 aa, Homo sapiens
SISGSGISTYYADSVKG

SEQ ID NO: 16891 - protein, 17 aa, Homo sapiens
SISGSGLSAYYADSVKG

SEQ ID NO: 16892 - protein, 17 aa, Homo sapiens
SISGSGLSIYYADSMKG

SEQ ID NO: 16893 - protein, 17 aa, Homo sapiens
SISGSGLSIYYADSVKG

SEQ ID NO: 16894 - protein, 17 aa, Homo sapiens
SISGSGLSRYYADSVKG

SEQ ID NO: 16895 - protein, 17 aa, Homo sapiens
SISGSGLSTYFADSVKG

SEQ ID NO: 16896 - protein, 17 aa, Homo sapiens
SISGSGLSTYYADSVKG

SEQ ID NO: 16897 - protein, 17 aa, Homo sapiens
SISGSGLSTYYAESVKG

SEQ ID NO: 16898 - protein, 19 aa, Homo sapiens
SISGSGSGGTTYYADSVKG

SEQ ID NO: 16899 - protein, 20 aa, Homo sapiens
SISGSSGERSHISYADSVKG

SEQ ID NO: 16900 - protein, 17 aa, Homo sapiens
SISGSSIYRYYAESVKG

SEQ ID NO: 16901 - protein, 17 aa, Homo sapiens
SISGSSLSTYYVDAVKG

SEQ ID NO: 16902 - protein, 17 aa, Homo sapiens
SISGSSLSTYYVDSVKG

SEQ ID NO: 16903 - protein, 17 aa, Homo sapiens
SISGSTLSTYYVDSVKG

SEQ ID NO: 16904 - protein, 17 aa, Homo sapiens
SISGTGGSSYYADAVKG

SEQ ID NO: 16905 - protein, 17 aa, Homo sapiens
SISGTGISKYYADSVKG

SEQ ID NO: 16906 - protein, 17 aa, Homo sapiens
SISGTGLSRYYIDSVKG

SEQ ID NO: 16907 - protein, 17 aa, Homo sapiens
SISGTGLSTYYADSVKG

SEQ ID NO: 16908 - protein, 17 aa, Homo sapiens
SISGTSLSAYYIDSVKG

SEQ ID NO: 16909 - protein, 17 aa, Homo sapiens
SISGTSLSRYYVDSVKG

SEQ ID NO: 16910 - protein, 17 aa, Homo sapiens
SISHHATYTHVADALRD

SEQ ID NO: 16911 - protein, 16 aa, Homo sapiens
SISHIGSTYYNPSLKS

SEQ ID NO: 16912 - protein, 17 aa, Homo sapiens
SISLSGVSMFYGDSVRG

SEQ ID NO: 16913 - protein, 15 aa, Homo sapiens
SISMIVVVVTYAFDI

SEQ ID NO: 16914 - protein, 15 aa, Homo sapiens
SISMIVVVVTYAFDV

SEQ ID NO: 16915 - protein, 17 aa, Homo sapiens
SISNSGFSRYFADSVKG

SEQ ID NO: 16916 - protein, 17 aa, Homo sapiens
SISRSSSYIFYADSVEG

SEQ ID NO: 16917 - protein, 17 aa, Homo sapiens
SISSSGGSTYYADSVKG

SEQ ID NO: 16918 - protein, 17 aa, Homo sapiens
SISSSSGYIFYADSVKG

SEQ ID NO: 16919 - protein, 17 aa, Homo sapiens
SISSSSSYIYYADSVKG

SEQ ID NO: 16920 - protein, 17 aa, Homo sapiens
SISSSTSYIYYADSMKG

SEQ ID NO: 16921 - protein, 17 aa, Homo sapiens
SISSTGISTYYADSVKG

SEQ ID NO: 16922 - protein, 17 aa, Homo sapiens
SISSTGLSRYYVDSVKG

SEQ ID NO: 16923 - protein, 17 aa, Homo sapiens
SISSTSKYNYYADSMKG

SEQ ID NO: 16924 - protein, 17 aa, Homo sapiens
SISTSGSTIYYADSVKG

SEQ ID NO: 16925 - protein, 17 aa, Homo sapiens
SISTSSNYIYNAVSVKG

SEQ ID NO: 16926 - protein, 7 aa, Homo sapiens
SISYFWA

SEQ ID NO: 16927 - protein, 17 aa, Homo sapiens
SITESGDSTYYSDSVRG

SEQ ID NO: 16928 - protein, 17 aa, Homo sapiens
SITFTGGSRYYADSVKG

SEQ ID NO: 16929 - protein, 17 aa, Homo sapiens
SITFTGGSTYYADSVKG

SEQ ID NO: 16930 - protein, 17 aa, Homo sapiens
SITGSGGSKYYADSVKG

SEQ ID NO: 16931 - protein, 15 aa, Homo sapiens
SITMIVVVVTYAFDI

SEQ ID NO: 16932 - protein, 17 aa, Homo sapiens
SITSSGISTYYTDSVKG

SEQ ID NO: 16933 - protein, 17 aa, Homo sapiens
SITSSGTYIYYADSVKG

SEQ ID NO: 16934 - protein, 15 aa, Homo sapiens
SITTIVVVVTYAFDI

SEQ ID NO: 16935 - protein, 17 aa, Homo sapiens
SITYSGGSTYYVDSVKG

SEQ ID NO: 16936 - protein, 16 aa, Homo sapiens
SIYFSGSTYYNPSLKS

SEQ ID NO: 16937 - protein, 16 aa, Homo sapiens
SIYHNGNTHYNPSVRS

SEQ ID NO: 16938 - protein, 16 aa, Homo sapiens
SIYHSGSRYHNPSLKN

SEQ ID NO: 16939 - protein, 16 aa, Homo sapiens
SIYHSGSTYYNPSLKS

SEQ ID NO: 16940 - protein, 17 aa, Homo sapiens
SIYPGDSDIKYNPSFQG

SEQ ID NO: 16941 - protein, 17 aa, Homo sapiens
SIYPGDSDTRYSPSFQG

SEQ ID NO: 16942 - protein, 16 aa, Homo sapiens
SIYSGGNTFYADSVRG

SEQ ID NO: 16943 - protein, 16 aa, Homo sapiens
SIYYGGGTYYNPSLKT

SEQ ID NO: 16944 - protein, 16 aa, Homo sapiens
SIYYGGRTYYNPSLKS

SEQ ID NO: 16945 - protein, 16 aa, Homo sapiens
SIYYNGDTYYNPSLKS

SEQ ID NO: 16946 - protein, 16 aa, Homo sapiens
SIYYSGGTYYNPSLKS

SEQ ID NO: 16947 - protein, 16 aa, Homo sapiens
SIYYSGITYYNPSLKS

SEQ ID NO: 16948 - protein, 16 aa, Homo sapiens
SIYYSGNAYYYPSLKS

SEQ ID NO: 16949 - protein, 16 aa, Homo sapiens
SIYYSGNTDYNPSLKS

SEQ ID NO: 16950 - protein, 16 aa, Homo sapiens
SIYYSGNTYYNSSLKS

SEQ ID NO: 16951 - protein, 16 aa, Homo sapiens
SIYYSGSAYYNPSLKS

SEQ ID NO: 16952 - protein, 16 aa, Homo sapiens
SIYYSGSTNYNPSLKS

SEQ ID NO: 16953 - protein, 16 aa, Homo sapiens
SIYYSGSTYNNPSLKS

SEQ ID NO: 16954 - protein, 16 aa, Homo sapiens
SIYYSGSTYYNPSLKS

SEQ ID NO: 16955 - protein, 16 aa, Homo sapiens
SIYYSGTTYYNPSLKS

SEQ ID NO: 16956 - protein, 14 aa, Homo sapiens
SKGAYGDHAEYLQY

SEQ ID NO: 16957 - protein, 6 aa, Homo sapiens
SKNWWT

SEQ ID NO: 16958 - protein, 11 aa, Homo sapiens
SKSDSDKQQGS

SEQ ID NO: 16959 - protein, 14 aa, Homo sapiens
SKSRSVPVSGYFDY

SEQ ID NO: 16960 - protein, 18 aa, Homo sapiens
SKWDAPAEQVMPVGGLEV

SEQ ID NO: 16961 - protein, 5 aa, Homo sapiens
SKWMH

SEQ ID NO: 16962 - protein, 5 aa, Homo sapiens
SKYMS

SEQ ID NO: 16963 - protein, 12 aa, Homo sapiens
SKYSGSHDAFDI

SEQ ID NO: 16964 - protein, 13 aa, Homo sapiens
SLGDNDNAGYLDY

SEQ ID NO: 16965 - protein, 17 aa, Homo sapiens
SLGGSGSGTYYAGSVKG

SEQ ID NO: 16966 - protein, 10 aa, Homo sapiens
SLGSGSYSSD

SEQ ID NO: 16967 - protein, 19 aa, Homo sapiens
SLGYCSSTSCYGAEYFFDF

SEQ ID NO: 16968 - protein, 10 aa, Homo sapiens
SLRYNFGPDD

SEQ ID NO: 16969 - protein, 17 aa, Homo sapiens
SLSGSGGSAYYADSVKG

SEQ ID NO: 16970 - protein, 14 aa, Homo sapiens
SLSIFGVVRPAFDV

SEQ ID NO: 16971 - protein, 17 aa, Homo sapiens
SLSSRSTYLYYADSVKG

SEQ ID NO: 16972 - protein, 17 aa, Homo sapiens
SLSVTGGSKYYADSVKG

SEQ ID NO: 16973 - protein, 17 aa, Homo sapiens
SLTADEGRRYYADSVKG

SEQ ID NO: 16974 - protein, 17 aa, Homo sapiens
SLTGSGGDTYYADSVKG

SEQ ID NO: 16975 - protein, 12 aa, Homo sapiens
SLTSGHTNYGIA

SEQ ID NO: 16976 - protein, 16 aa, Homo sapiens
SLYFGGRPHYNPSLKG

SEQ ID NO: 16977 - protein, 8 aa, Homo sapiens
SLYSDTTA

SEQ ID NO: 16978 - protein, 9 aa, Homo sapiens
SLYTTTTVL

SEQ ID NO: 16979 - protein, 16 aa, Homo sapiens
SMFHSGRGYFNPSLQS

SEQ ID NO: 16980 - protein, 16 aa, Homo sapiens
SMFSSGSSYYKPSLKS

SEQ ID NO: 16981 - protein, 16 aa, Homo sapiens
SMHIGDSTYYAESVKG

SEQ ID NO: 16982 - protein, 16 aa, Homo sapiens
SMNELVPLSFYYYMDV

SEQ ID NO: 16983 - protein, 17 aa, Homo sapiens
SMSFSGGSTYYTDSVKG

SEQ ID NO: 16984 - protein, 16 aa, Homo sapiens
SMYYTGYTYFNPSLKS

SEQ ID NO: 16985 - protein, 16 aa, Homo sapiens
SMYYTGYTYLNPSLKS

SEQ ID NO: 16986 - protein, 5 aa, Homo sapiens
SNAFS

SEQ ID NO: 16987 - protein, 5 aa, Homo sapiens
SNAIH

SEQ ID NO: 16988 - protein, 5 aa, Homo sapiens
SNAII

SEQ ID NO: 16989 - protein, 5 aa, Homo sapiens
SNAIN

SEQ ID NO: 16990 - protein, 5 aa, Homo sapiens
SNAIS

SEQ ID NO: 16991 - protein, 5 aa, Homo sapiens
SNALN

SEQ ID NO: 16992 - protein, 5 aa, Homo sapiens
SNALS

SEQ ID NO: 16993 - protein, 5 aa, Homo sapiens
SNAMY

SEQ ID NO: 16994 - protein, 5 aa, Homo sapiens
SNAVS

SEQ ID NO: 16995 - protein, 7 aa, Homo sapiens
SNDQRPS

SEQ ID NO: 16996 - protein, 9 aa, Homo sapiens
SNEGTHMDV

SEQ ID NO: 16997 - protein, 19 aa, Homo sapiens
SNGGFCSDGRCFFYYPMEV

SEQ ID NO: 16998 - protein, 5 aa, Homo sapiens
SNGIA

SEQ ID NO: 16999 - protein, 5 aa, Homo sapiens
SNGIS

SEQ ID NO: 17000 - protein, 5 aa, Homo sapiens
SNGLS

SEQ ID NO: 17001 - protein, 7 aa, Homo sapiens
SNHQRPS

SEQ ID NO: 17002 - protein, 11 aa, Homo sapiens
SNHYYYYYMAV

SEQ ID NO: 17003 - protein, 5 aa, Homo sapiens
SNIIS

SEQ ID NO: 17004 - protein, 7 aa, Homo sapiens
SNIYYWG

SEQ ID NO: 17005 - protein, 7 aa, Homo sapiens
SNNFYWG

SEQ ID NO: 17006 - protein, 5 aa, Homo sapiens
SNNIY

SEQ ID NO: 17007 - protein, 7 aa, Homo sapiens
SNNQRPS

SEQ ID NO: 17008 - protein, 7 aa, Homo sapiens
SNNQWPS

SEQ ID NO: 17009 - protein, 7 aa, Homo sapiens
SNNVAWN

SEQ ID NO: 17010 - protein, 11 aa, Homo sapiens
SNNYYDNCAFA

SEQ ID NO: 17011 - protein, 11 aa, Homo sapiens
SNNYYDSLGFA

SEQ ID NO: 17012 - protein, 11 aa, Homo sapiens
SNNYYDSSGFA

SEQ ID NO: 17013 - protein, 11 aa, Homo sapiens
SNNYYDSSGFV

SEQ ID NO: 17014 - protein, 7 aa, Homo sapiens
SNSAAWI

SEQ ID NO: 17015 - protein, 7 aa, Homo sapiens
SNSAAWN

SEQ ID NO: 17016 - protein, 7 aa, Homo sapiens
SNSAGWN

SEQ ID NO: 17017 - protein, 7 aa, Homo sapiens
SNSAIWN

SEQ ID NO: 17018 - protein, 5 aa, Homo sapiens
SNSFS

SEQ ID NO: 17019 - protein, 7 aa, Homo sapiens
SNSFYWG

SEQ ID NO: 17020 - protein, 5 aa, Homo sapiens
SNSIS

SEQ ID NO: 17021 - protein, 5 aa, Homo sapiens
SNSIS

SEQ ID NO: 17022 - protein, 13 aa, Homo sapiens
SNSSPYQGRLFDY

SEQ ID NO: 17023 - protein, 7 aa, Homo sapiens
SNSVYWG

SEQ ID NO: 17024 - protein, 7 aa, Homo sapiens
SNSYYWG

SEQ ID NO: 17025 - protein, 7 aa, Homo sapiens
SNTQRPS

SEQ ID NO: 17026 - protein, 15 aa, Homo sapiens
SNYGGDSGREDAIDI

SEQ ID NO: 17027 - protein, 5 aa, Homo sapiens
SNYMN

SEQ ID NO: 17028 - protein, 5 aa, Homo sapiens
SNYMS

SEQ ID NO: 17029 - protein, 5 aa, Homo sapiens
SNYVT

SEQ ID NO: 17030 - protein, 6 aa, Homo sapiens
SNYYWG

SEQ ID NO: 17031 - protein, 14 aa, Homo sapiens
SPADYDSSPEYFQH

SEQ ID NO: 17032 - protein, 11 aa, Homo sapiens
SPAYFYYYMDV

SEQ ID NO: 17033 - protein, 12 aa, Homo sapiens
SPGAPNDLSLDS

SEQ ID NO: 17034 - protein, 11 aa, Homo sapiens
SPGYYHNYFDN

SEQ ID NO: 17035 - protein, 13 aa, Homo sapiens
SPHQVGSMGNHDY

SEQ ID NO: 17036 - protein, 11 aa, Homo sapiens
SPNYYPSVIDY

SEQ ID NO: 17037 - protein, 14 aa, Homo sapiens
SPPYYDSSGPLFDY

SEQ ID NO: 17038 - protein, 11 aa, Homo sapiens
SPQIYENWFDS

SEQ ID NO: 17039 - protein, 12 aa, Homo sapiens
SPTYYSDNFFDY

SEQ ID NO: 17040 - protein, 11 aa, Homo sapiens
SPWNDVRSLDY

SEQ ID NO: 17041 - protein, 13 aa, Homo sapiens
SPYYYDSNVEFDS

SEQ ID NO: 17042 - protein, 5 aa, Homo sapiens
SQAIS

SEQ ID NO: 17043 - protein, 13 aa, Homo sapiens
SQDDYDAPPLPDY

SEQ ID NO: 17044 - protein, 15 aa, Homo sapiens
SQGELIGELLSPFDY

SEQ ID NO: 17045 - protein, 5 aa, Homo sapiens
SQGIT

SEQ ID NO: 17046 - protein, 10 aa, Homo sapiens
SQLSYGYWDY

SEQ ID NO: 17047 - protein, 15 aa, Homo sapiens
SQNYYDSSGSMGFDP

SEQ ID NO: 17048 - protein, 14 aa, Homo sapiens
SQSRSIPVAGNFDY

SEQ ID NO: 17049 - protein, 13 aa, Homo sapiens
SQSTMPPTGWFDP

SEQ ID NO: 17050 - protein, 11 aa, Homo sapiens
SQTYYLGFLDY

SEQ ID NO: 17051 - protein, 12 aa, Homo sapiens
SRAAAYYYGLDV

SEQ ID NO: 17052 - protein, 7 aa, Homo sapiens
SRDYSWT

SEQ ID NO: 17053 - protein, 7 aa, Homo sapiens
SREVGVS

SEQ ID NO: 17054 - protein, 11 aa, Homo sapiens
SRGARVGAFDI

SEQ ID NO: 17055 - protein, 14 aa, Homo sapiens
SRGDYGDHAEYIQY

SEQ ID NO: 17056 - protein, 12 aa, Homo sapiens
SRGFGELFTFDA

SEQ ID NO: 17057 - protein, 14 aa, Homo sapiens
SRGTGDYYHQTFDY

SEQ ID NO: 17058 - protein, 11 aa, Homo sapiens
SRGYHYESSEV

SEQ ID NO: 17059 - protein, 12 aa, Homo sapiens
SRGYMPAYGMDV

SEQ ID NO: 17060 - protein, 11 aa, Homo sapiens
SRNYYPSYFDY

SEQ ID NO: 17061 - protein, 17 aa, Homo sapiens
SRRSGAAGTGGVRAFDI

SEQ ID NO: 17062 - protein, 5 aa, Homo sapiens
SRSFT

SEQ ID NO: 17063 - protein, 7 aa, Homo sapiens
SRSHYWG

SEQ ID NO: 17064 - protein, 7 aa, Homo sapiens
SRSYYWG

SEQ ID NO: 17065 - protein, 18 aa, Homo sapiens
SRYYYDSSGYYPDDAFDI

SEQ ID NO: 17066 - protein, 11 aa, Homo sapiens
SRYYYYYYMDV

SEQ ID NO: 17067 - protein, 5 aa, Homo sapiens
SSAIN

SEQ ID NO: 17068 - protein, 5 aa, Homo sapiens
SSAIS

SEQ ID NO: 17069 - protein, 5 aa, Homo sapiens
SSAMS

SEQ ID NO: 17070 - protein, 5 aa, Homo sapiens
SSAVQ

SEQ ID NO: 17071 - protein, 11 aa, Homo sapiens
SSAYYLEYLQH

SEQ ID NO: 17072 - protein, 7 aa, Homo sapiens
SSAYYWG

SEQ ID NO: 17073 - protein, 5 aa, Homo sapiens
SSDIH

SEQ ID NO: 17074 - protein, 95 aa, Homo sapiens
SSDLTQPPSVSVSPGQTARITCSGDAFPKLYAYWYQQKPGRAPVLVIYRDTERPSGIPERFSGSSSGTTATLTISGVQAEDEADYYCQSADSSGT

SEQ ID NO: 17075 - protein, 107 aa, Homo sapiens
SSDLTQPPSVSVSPGQTARITCSGDAFPKLYAYWYQQKPGRAPVLVIYRDTERPSGIPERFSGSSSGTTATLTISGVQAEDEADYYCQSADSSGTRVFGPGTKITVL

SEQ ID NO: 17076 - protein, 20 aa, Homo sapiens
SSDYGDYVGGRRYFYYGLDV

SEQ ID NO: 17077 - protein, 94 aa, Homo sapiens
SSELTQDPAVSVALGQTVRITCQGDRLRRNYASWYQQKPGQAPLLVLYGKDKRPSGIPDRFSGSSSGNTGSLTITGAQAEDEGDYYCNSRDNNG

SEQ ID NO: 17078 - protein, 108 aa, Homo sapiens
SSELTQDPAVSVALGQTVRITCQGDRLRRNYASWYQQKPGQAPLLVLYGKDKRPSGIPDRFSGSSSGNTGSLTITGAQAEDEGDYYCNSRDNNGDYYVFGGGTKVTVL

SEQ ID NO: 17079 - protein, 96 aa, Homo sapiens
SSELTQDPAVSVALGQTVRITCQGDSLRRYYASWYQQKPGQTPILVIYGKNNRPSGIPDRFSGSSSGNTASLTITGAQAEDEADYYCNSRDSSGQY

SEQ ID NO: 17080 - protein, 108 aa, Homo sapiens
SSELTQDPAVSVALGQTVRITCQGDSLRRYYASWYQQKPGQTPILVIYGKNNRPSGIPDRFSGSSSGNTASLTITGAQAEDEADYYCNSRDSSGQYRVFGGGTRLTVL

SEQ ID NO: 17081 - protein, 95 aa, Homo sapiens
SSELTQDPAVSVALGQTVRITCQGDSLRSFYASWYQQKPGQAPVIVIYGKTNRPSGIPDRFSGSGSGNTASLTITGAQAEDEADYYCNSRHSSGN

SEQ ID NO: 17082 - protein, 108 aa, Homo sapiens
SSELTQDPAVSVALGQTVRITCQGDSLRSFYASWYQQKPGQAPVIVIYGKTNRPSGIPDRFSGSGSGNTASLTITGAQAEDEADYYCNSRHSSGNSWVFGTGTRVTVL

SEQ ID NO: 17083 - protein, 95 aa, Homo sapiens
SSELTQDPAVSVALGQTVRITCQGDSLRSSYASWYQQKPGQAPVLVIYGKHKRPSGIPDRFSGSSSGNTASLTITGAQAEDEANYYCNSRDTSGN

SEQ ID NO: 17084 - protein, 107 aa, Homo sapiens
SSELTQDPAVSVALGQTVRITCQGDSLRSSYASWYQQKPGQAPVLVIYGKHKRPSGIPDRFSGSSSGNTASLTITGAQAEDEANYYCNSRDTSGNHPFGGGTKLTVL

SEQ ID NO: 17085 - protein, 97 aa, Homo sapiens
SSELTQDPAVSVALGQTVRITCQGDSLRSYYANWYQQKPGQAPVLVIHGKNNRPSGIPDRFSGSSSGNTASLTITGAQAEDEAAYYCNSRDSSGNHL

SEQ ID NO: 17086 - protein, 109 aa, Homo sapiens
SSELTQDPAVSVALGQTVRITCQGDSLRSYYANWYQQKPGQAPVLVIHGKNNRPSGIPDRFSGSSSGNTASLTITGAQAEDEAAYYCNSRDSSGNHLVVFGGGTKLTVL

SEQ ID NO: 17087 - protein, 94 aa, Homo sapiens
SSELTQDPAVSVALGQTVRITCQGDSLRSYYASWYQQKPGQAPVLVIYGKNNRPSGIPDRFSGSSSGNTASLTITGAQAEDEADYYCNSRDSSG

SEQ ID NO: 17088 - protein, 96 aa, Homo sapiens
SSELTQDPAVSVALGQTVRITCQGDSLRSYYASWYQQKPGQAPVLVIYGKNNRPSGIPDRFSGSSSGNTASLTITGAQAEDEADYYCNSRDSSGNH

SEQ ID NO: 17089 - protein, 97 aa, Homo sapiens
SSELTQDPAVSVALGQTVRITCQGDSLRSYYASWYQQKPGQAPVLVIYGKNNRPSGIPDRFSGSSSGNTASLTITGAQAEDEADYYCNSRDSSGNHL

SEQ ID NO: 17090 - protein, 110 aa, Homo sapiens
SSELTQDPAVSVALGQTVRITCQGDSLRSYYASWYQQKPGQAPVLVIYGKNNRPSGIPDRFSGSSSGNTASLTITGAQAEDEADYYCNSRDSSGNHLGNVFGTGTKVTVL

SEQ ID NO: 17091 - protein, 110 aa, Homo sapiens
SSELTQDPAVSVALGQTVRITCQGDSLRSYYASWYQQKPGQAPVLVIYGKNNRPSGIPDRFSGSSSGNTASLTITGAQAEDEADYYCNSRDSSGNHLGWVFGGGTKLTVL

SEQ ID NO: 17092 - protein, 108 aa, Homo sapiens
SSELTQDPAVSVALGQTVRITCQGDSLRSYYASWYQQKPGQAPVLVIYGKNNRPSGIPDRFSGSSSGNTASLTITGAQAEDEADYYCNSRDSSGNHLVFGGGTKLTVL

SEQ ID NO: 17093 - protein, 108 aa, Homo sapiens
SSELTQDPAVSVALGQTVRITCQGDSLRSYYASWYQQKPGQAPVLVIYGKNNRPSGIPDRFSGSSSGNTASLTITGAQAEDEADYYCNSRDSSGNHVVFGGGTKLTVL

SEQ ID NO: 17094 - protein, 107 aa, Homo sapiens
SSELTQDPAVSVALGQTVRITCQGDSLRSYYASWYQQKPGQAPVLVIYGKNNRPSGIPDRFSGSSSGNTASLTITGAQAEDEADYYCNSRDSSGNWVFGGGTKLTVL

SEQ ID NO: 17095 - protein, 94 aa, Homo sapiens
SSELTQDPAVSVALGQTVRITCQGDSLRTFYASWYQQKPGQAPVLVIYGKNNRPSGIPDRFSGSTSGNTASLTITGTQAEDEADYYCNSRDSTG

SEQ ID NO: 17096 - protein, 108 aa, Homo sapiens
SSELTQDPAVSVALGQTVRITCQGDSLRTFYASWYQQKPGQAPVLVIYGKNNRPSGIPDRFSGSTSGNTASLTITGTQAEDEADYYCNSRDSTGKVYVFGTGTYVTVL

SEQ ID NO: 17097 - protein, 96 aa, Homo sapiens
SSELTQDPAVSVALGQTVRITCQGDSLRTYYANWYQQKPRQAPLLVIFGKNNRPSGIPDRFSGSRSGNTASLTITGAQAEDEADYYCNSRDSSGNL

SEQ ID NO: 17098 - protein, 109 aa, Homo sapiens
SSELTQDPAVSVALGQTVRITCQGDSLRTYYANWYQQKPRQAPLLVIFGKNNRPSGIPDRFSGSRSGNTASLTITGAQAEDEADYYCNSRDSSGNLHVVFGGGTKLTVL

SEQ ID NO: 17099 - protein, 96 aa, Homo sapiens
SSELTQDPAVSVALGQTVRMTCQGDSLRSFYASWYQQKPGQAPVVVIYGKNNRPSGIPDRFSGSTSGNTASLTITGAQAEDEADYYCQSRDSSADH

SEQ ID NO: 17100 - protein, 109 aa, Homo sapiens
SSELTQDPAVSVALGQTVRMTCQGDSLRSFYASWYQQKPGQAPVVVIYGKNNRPSGIPDRFSGSTSGNTASLTITGAQAEDEADYYCQSRDSSADHRWVFGGGTKLTVL

SEQ ID NO: 17101 - protein, 96 aa, Homo sapiens
SSELTQDPAVSVVLGQTVKITCQGDNLRKYYASWYQQKPGQAPVVVIYGKNDRPSGIPDRFSGSTSGNTASLTITGAQAEDEADYWCQSRDSSDDH

SEQ ID NO: 17102 - protein, 109 aa, Homo sapiens
SSELTQDPAVSVVLGQTVKITCQGDNLRKYYASWYQQKPGQAPVVVIYGKNDRPSGIPDRFSGSTSGNTASLTITGAQAEDEADYWCQSRDSSDDHSWVFGGGTKLTVL

SEQ ID NO: 17103 - protein, 96 aa, Homo sapiens
SSELTQHPAVSVALGQTVRITCQGDILRDYYASWYQQKPGQAPVVVIYGKNDRPSGIPDRFSGSSSGNTASLTITGALAEDEADYYCQSRDSSVNY

SEQ ID NO: 17104 - protein, 109 aa, Homo sapiens
SSELTQHPAVSVALGQTVRITCQGDILRDYYASWYQQKPGQAPVVVIYGKNDRPSGIPDRFSGSSSGNTASLTITGALAEDEADYYCQSRDSSVNYRWVFGGGTKLTVL

SEQ ID NO: 17105 - protein, 94 aa, Homo sapiens
SSELTQPPSVSVSPGQTARISCSGDILGDKYTCWYQQRPGRSPVLVIHEDTERPSGIPERFSGSKSGNTATLTISGAQAMDEADYYCQAWDSST

SEQ ID NO: 17106 - protein, 107 aa, Homo sapiens
SSELTQPPSVSVSPGQTARISCSGDILGDKYTCWYQQRPGRSPVLVIHEDTERPSGIPERFSGSKSGNTATLTISGAQAMDEADYYCQAWDSSTPVVFGGGTKLTVL

SEQ ID NO: 17107 - protein, 96 aa, Homo sapiens
SSELTQYPAVSAALGQTVRITCEGDSLREYYATWYQQKPGQAPVVVIYGKNDRPSGIPDRFSGSTSGNTASLTITGALAEDEADYYCQSRDSTLNY

SEQ ID NO: 17108 - protein, 109 aa, Homo sapiens
SSELTQYPAVSAALGQTVRITCEGDSLREYYATWYQQKPGQAPVVVIYGKNDRPSGIPDRFSGSTSGNTASLTITGALAEDEADYYCQSRDSTLNYRWVFGGGTKLTVL

SEQ ID NO: 17109 - protein, 13 aa, Homo sapiens
SSFAGTNNFAFYV

SEQ ID NO: 17110 - protein, 12 aa, Homo sapiens
SSFGPYYYGMDV

SEQ ID NO: 17111 - protein, 12 aa, Homo sapiens
SSFTSSSSTRYV

SEQ ID NO: 17112 - protein, 7 aa, Homo sapiens
SSGDSWS

SEQ ID NO: 17113 - protein, 5 aa, Homo sapiens
SSGIS

SEQ ID NO: 17114 - protein, 5 aa, Homo sapiens
SSGMH

SEQ ID NO: 17115 - protein, 13 aa, Homo sapiens
SSGYDYRGNYFDY

SEQ ID NO: 17116 - protein, 15 aa, Homo sapiens
SSGYHLLSSPLSFQH

SEQ ID NO: 17117 - protein, 15 aa, Homo sapiens
SSGYHLLSSPLTFQR

SEQ ID NO: 17118 - protein, 12 aa, Homo sapiens
SSGYMLKGWLDP

SEQ ID NO: 17119 - protein, 12 aa, Homo sapiens
SSGYTLRGRLDP

SEQ ID NO: 17120 - protein, 11 aa, Homo sapiens
SSGYYHNYFDY

SEQ ID NO: 17121 - protein, 11 aa, Homo sapiens
SSGYYHNYFNY

SEQ ID NO: 17122 - protein, 11 aa, Homo sapiens
SSGYYHNYIDN

SEQ ID NO: 17123 - protein, 12 aa, Homo sapiens
SSGYYLRGGLDP

SEQ ID NO: 17124 - protein, 7 aa, Homo sapiens
SSGYYWG

SEQ ID NO: 17125 - protein, 10 aa, Homo sapiens
SSHTSSNTFL

SEQ ID NO: 17126 - protein, 7 aa, Homo sapiens
SSKYYWG

SEQ ID NO: 17127 - protein, 7 aa, Homo sapiens
SSLSYWG

SEQ ID NO: 17128 - protein, 8 aa, Homo sapiens
SSNQEFDY

SEQ ID NO: 17129 - protein, 7 aa, Homo sapiens
SSNSYWG

SEQ ID NO: 17130 - protein, 6 aa, Homo sapiens
SSNWWS

SEQ ID NO: 17131 - protein, 7 aa, Homo sapiens
SSNYYWG

SEQ ID NO: 17132 - protein, 7 aa, Homo sapiens
SSNYYWS

SEQ ID NO: 17133 - protein, 14 aa, Homo sapiens
SSPNDILTGYYLDY

SEQ ID NO: 17134 - protein, 12 aa, Homo sapiens
SSRDSNYAIWDL

SEQ ID NO: 17135 - protein, 7 aa, Homo sapiens
SSRYYWA

SEQ ID NO: 17136 - protein, 7 aa, Homo sapiens
SSRYYWG

SEQ ID NO: 17137 - protein, 14 aa, Homo sapiens
SSSQGYSSSWYIDD

SEQ ID NO: 17138 - protein, 14 aa, Homo sapiens
SSSQGYSTSWYIDS

SEQ ID NO: 17139 - protein, 10 aa, Homo sapiens
SSSRSGSTYV

SEQ ID NO: 17140 - protein, 7 aa, Homo sapiens
SSSYHWG

SEQ ID NO: 17141 - protein, 7 aa, Homo sapiens
SSSYYWG

SEQ ID NO: 17142 - protein, 13 aa, Homo sapiens
SSTGAVTRGHQPY

SEQ ID NO: 17143 - protein, 7 aa, Homo sapiens
SSTYYWA

SEQ ID NO: 17144 - protein, 7 aa, Homo sapiens
SSTYYWG

SEQ ID NO: 17145 - protein, 11 aa, Homo sapiens
SSVAPYWYFGL

SEQ ID NO: 17146 - protein, 18 aa, Homo sapiens
SSWGLGFEWELLPGYFDY

SEQ ID NO: 17147 - protein, 5 aa, Homo sapiens
SSWIT

SEQ ID NO: 17148 - protein, 5 aa, Homo sapiens
SSWMD

SEQ ID NO: 17149 - protein, 5 aa, Homo sapiens
SSWMQ

SEQ ID NO: 17150 - protein, 10 aa, Homo sapiens
SSYADNNNPG

SEQ ID NO: 17151 - protein, 10 aa, Homo sapiens
SSYAGNNNSL

SEQ ID NO: 17152 - protein, 10 aa, Homo sapiens
SSYAGNNNWV

SEQ ID NO: 17153 - protein, 9 aa, Homo sapiens
SSYAGNSWV

SEQ ID NO: 17154 - protein, 9 aa, Homo sapiens
SSYAGRRWV

SEQ ID NO: 17155 - protein, 10 aa, Homo sapiens
SSYAGRYTWV

SEQ ID NO: 17156 - protein, 10 aa, Homo sapiens
SSYAGSDNQK

SEQ ID NO: 17157 - protein, 11 aa, Homo sapiens
SSYAGSHTLVV

SEQ ID NO: 17158 - protein, 10 aa, Homo sapiens
SSYAGSNDQK

SEQ ID NO: 17159 - protein, 10 aa, Homo sapiens
SSYAGSNNFV

SEQ ID NO: 17160 - protein, 12 aa, Homo sapiens
SSYAGSNNLRYV

SEQ ID NO: 17161 - protein, 11 aa, Homo sapiens
SSYAGSNNLVV

SEQ ID NO: 17162 - protein, 10 aa, Homo sapiens
SSYAGSNNWV

SEQ ID NO: 17163 - protein, 10 aa, Homo sapiens
SSYAGSNSWV

SEQ ID NO: 17164 - protein, 12 aa, Homo sapiens
SSYAGSRTFPYV

SEQ ID NO: 17165 - protein, 10 aa, Homo sapiens
SSYARTRSWV

SEQ ID NO: 17166 - protein, 11 aa, Homo sapiens
SSYEGTSTYVI

SEQ ID NO: 17167 - protein, 10 aa, Homo sapiens
SSYGGSNNLV

SEQ ID NO: 17168 - protein, 69 aa, Homo sapiens
SSYGMHWVRQAPGKGLEWVAVIWYDGSNKYYTDSVKGRFTISRDNSKNTLYLQMNSLRAEDTAVYYCAR

SEQ ID NO: 17169 - protein, 95 aa, Homo sapiens
SSYGMHWVRQAPGKGLEWVAVIWYDGSNKYYTDSVKGRFTISRDNSKNTLYLQMNSLRAEDTAVYYCARDSRPYGGNSPSHFDYWGQGTLVTVSS

SEQ ID NO: 17170 - protein, 14 aa, Homo sapiens
SSYLISASTYSNYA

SEQ ID NO: 17171 - protein, 11 aa, Homo sapiens
SSYRDSNSVVM

SEQ ID NO: 17172 - protein, 10 aa, Homo sapiens
SSYRGGNSVV

SEQ ID NO: 17173 - protein, 11 aa, Homo sapiens
SSYSGSNNPYV

SEQ ID NO: 17174 - protein, 10 aa, Homo sapiens
SSYTDRTPYV

SEQ ID NO: 17175 - protein, 11 aa, Homo sapiens
SSYTGTTVVRV

SEQ ID NO: 17176 - protein, 11 aa, Homo sapiens
SSYTRGTSLVV

SEQ ID NO: 17177 - protein, 11 aa, Homo sapiens
SSYTRRTTPYV

SEQ ID NO: 17178 - protein, 11 aa, Homo sapiens
SSYTSDIIPVF

SEQ ID NO: 17179 - protein, 10 aa, Homo sapiens
SSYTSSGIWV

SEQ ID NO: 17180 - protein, 10 aa, Homo sapiens
SSYTSSILVV

SEQ ID NO: 17181 - protein, 10 aa, Homo sapiens
SSYTSSITYV

SEQ ID NO: 17182 - protein, 11 aa, Homo sapiens
SSYTSSNAFVV

SEQ ID NO: 17183 - protein, 12 aa, Homo sapiens
SSYTSSNTPLYV

SEQ ID NO: 17184 - protein, 10 aa, Homo sapiens
SSYTSSNTRV

SEQ ID NO: 17185 - protein, 10 aa, Homo sapiens
SSYTSSSAVV

SEQ ID NO: 17186 - protein, 10 aa, Homo sapiens
SSYTSSSNVV

SEQ ID NO: 17187 - protein, 11 aa, Homo sapiens
SSYTSSSSLGI

SEQ ID NO: 17188 - protein, 10 aa, Homo sapiens
SSYTSSSSYV

SEQ ID NO: 17189 - protein, 10 aa, Homo sapiens
SSYTSSSTLL

SEQ ID NO: 17190 - protein, 10 aa, Homo sapiens
SSYTSSSTLV

SEQ ID NO: 17191 - protein, 11 aa, Homo sapiens
SSYTSSSTLVV

SEQ ID NO: 17192 - protein, 12 aa, Homo sapiens
SSYTSSSTLYVV

SEQ ID NO: 17193 - protein, 12 aa, Homo sapiens
SSYTSSSTPLYV

SEQ ID NO: 17194 - protein, 10 aa, Homo sapiens
SSYTSSSTRV

SEQ ID NO: 17195 - protein, 10 aa, Homo sapiens
SSYTSSSTVV

SEQ ID NO: 17196 - protein, 10 aa, Homo sapiens
SSYTSSSTWV

SEQ ID NO: 17197 - protein, 10 aa, Homo sapiens
SSYTSSSTYV

SEQ ID NO: 17198 - protein, 11 aa, Homo sapiens
SSYTSSSTYWV

SEQ ID NO: 17199 - protein, 10 aa, Homo sapiens
SSYTSSSYVV

SEQ ID NO: 17200 - protein, 10 aa, Homo sapiens
SSYTSSTTVV

SEQ ID NO: 17201 - protein, 11 aa, Homo sapiens
SSYTSSVSLDV

SEQ ID NO: 17202 - protein, 10 aa, Homo sapiens
SSYTSTSTFV

SEQ ID NO: 17203 - protein, 11 aa, Homo sapiens
SSYTSTTLHVL

SEQ ID NO: 17204 - protein, 10 aa, Homo sapiens
SSYTTNNNWV

SEQ ID NO: 17205 - protein, 10 aa, Homo sapiens
SSYVGRNNLV

SEQ ID NO: 17206 - protein, 11 aa, Homo sapiens
SSYVHSSTSWV

SEQ ID NO: 17207 - protein, 12 aa, Homo sapiens
SSYVVSRRSRPV

SEQ ID NO: 17208 - protein, 5 aa, Homo sapiens
SSYWS

SEQ ID NO: 17209 - protein, 7 aa, Homo sapiens
SSYYYWG

SEQ ID NO: 17210 - protein, 5 aa, Homo sapiens
STALH

SEQ ID NO: 17211 - protein, 12 aa, Homo sapiens
STEDTLSYYFDY

SEQ ID NO: 17212 - protein, 10 aa, Homo sapiens
STFGGYAMDV

SEQ ID NO: 17213 - protein, 16 aa, Homo sapiens
STFHSGTTYYNPSLKS

SEQ ID NO: 17214 - protein, 16 aa, Homo sapiens
STFHTGTTYYKPSLKS

SEQ ID NO: 17215 - protein, 10 aa, Homo sapiens
STGDQEPFDY

SEQ ID NO: 17216 - protein, 7 aa, Homo sapiens
STGVGVA

SEQ ID NO: 17217 - protein, 13 aa, Homo sapiens
STGVVAVWEYFQE

SEQ ID NO: 17218 - protein, 11 aa, Homo sapiens
STGYYHNYFDN

SEQ ID NO: 17219 - protein, 11 aa, Homo sapiens
STGYYHNYFDS

SEQ ID NO: 17220 - protein, 5 aa, Homo sapiens
STHMK

SEQ ID NO: 17221 - protein, 15 aa, Homo sapiens
STNHYYGGTDNWFDP

SEQ ID NO: 17222 - protein, 7 aa, Homo sapiens
STNTRSS

SEQ ID NO: 17223 - protein, 18 aa, Homo sapiens
STPYYDFWSGPYPQPFDY

SEQ ID NO: 17224 - protein, 5 aa, Homo sapiens
STSIS

SEQ ID NO: 17225 - protein, 7 aa, Homo sapiens
STSNKHS

SEQ ID NO: 17226 - protein, 7 aa, Homo sapiens
STSRRAT

SEQ ID NO: 17227 - protein, 7 aa, Homo sapiens
STSSRAT

SEQ ID NO: 17228 - protein, 7 aa, Homo sapiens
STSYFWT

SEQ ID NO: 17229 - protein, 7 aa, Homo sapiens
STSYYWA

SEQ ID NO: 17230 - protein, 5 aa, Homo sapiens
STTMS

SEQ ID NO: 17231 - protein, 7 aa, Homo sapiens
STTNKHS

SEQ ID NO: 17232 - protein, 11 aa, Homo sapiens
STWDDGLNLWV

SEQ ID NO: 17233 - protein, 11 aa, Homo sapiens
STWDDSLSAQV

SEQ ID NO: 17234 - protein, 11 aa, Homo sapiens
STWDFSLSVWV

SEQ ID NO: 17235 - protein, 11 aa, Homo sapiens
STWDSSLNAVV

SEQ ID NO: 17236 - protein, 11 aa, Homo sapiens
STWDSSLSAVV

SEQ ID NO: 17237 - protein, 11 aa, Homo sapiens
STWDSSLSSQV

SEQ ID NO: 17238 - protein, 11 aa, Homo sapiens
STWDSSLTAYV

SEQ ID NO: 17239 - protein, 11 aa, Homo sapiens
STWDYSLSAWV

SEQ ID NO: 17240 - protein, 12 aa, Homo sapiens
SVETTGGWKLDP

SEQ ID NO: 17241 - protein, 11 aa, Homo sapiens
SVGYYLSYLDS

SEQ ID NO: 17242 - protein, 16 aa, Homo sapiens
SVHHSGTTYYNPSLKS

SEQ ID NO: 17243 - protein, 17 aa, Homo sapiens
SVIFIFGTANYAQRFQG

SEQ ID NO: 17244 - protein, 17 aa, Homo sapiens
SVIPTLGITNYAQRFQG

SEQ ID NO: 17245 - protein, 13 aa, Homo sapiens
SVKGIVAAGLFDY

SEQ ID NO: 17246 - protein, 17 aa, Homo sapiens
SVKQDGREETYADSMKG

SEQ ID NO: 17247 - protein, 98 aa, Homo sapiens
SVLTQPPSASGLPGQRVTISCSGSSSNIGNNYVYWYQQLPGTAPKLLIYRNNQRPSGVPDRFSGSKSGTSASLAISGLRSEDEADYYCAAWDDTLSGP

SEQ ID NO: 17248 - protein, 111 aa, Homo sapiens
SVLTQPPSASGLPGQRVTISCSGSSSNIGNNYVYWYQQLPGTAPKLLIYRNNQRPSGVPDRFSGSKSGTSASLAISGLRSEDEADYYCAAWDDTLSGPNWVFGGGTKLTVL

SEQ ID NO: 17249 - protein, 17 aa, Homo sapiens
SVNWNGGNTDYADSVKG

SEQ ID NO: 17250 - protein, 10 aa, Homo sapiens
SVQRLQWYAF

SEQ ID NO: 17251 - protein, 12 aa, Homo sapiens
SVQTTGGWKLDP

SEQ ID NO: 17252 - protein, 17 aa, Homo sapiens
SVSGSGDSTYYADSVKG

SEQ ID NO: 17253 - protein, 17 aa, Homo sapiens
SVSGSGISTYYADSVKG

SEQ ID NO: 17254 - protein, 7 aa, Homo sapiens
SVSRRAT

SEQ ID NO: 17255 - protein, 11 aa, Homo sapiens
SVWDDRLNARV

SEQ ID NO: 17256 - protein, 16 aa, Homo sapiens
SVYYRGTTYYGPSFGG

SEQ ID NO: 17257 - protein, 6 aa, Homo sapiens
SVYYWG

SEQ ID NO: 17258 - protein, 5 aa, Homo sapiens
SYAFS

SEQ ID NO: 17259 - protein, 5 aa, Homo sapiens
SYAIA

SEQ ID NO: 17260 - protein, 5 aa, Homo sapiens
SYAIH

SEQ ID NO: 17261 - protein, 5 aa, Homo sapiens
SYAII

SEQ ID NO: 17262 - protein, 5 aa, Homo sapiens
SYAIN

SEQ ID NO: 17263 - protein, 5 aa, Homo sapiens
SYAIS

SEQ ID NO: 17264 - protein, 5 aa, Homo sapiens
SYAIT

SEQ ID NO: 17265 - protein, 5 aa, Homo sapiens
SYALH

SEQ ID NO: 17266 - protein, 5 aa, Homo sapiens
SYALS

SEQ ID NO: 17267 - protein, 95 aa, Homo sapiens
SYALTQPPSVSVAPGQTARISCEGNIIGTRSVHWYQQRPGQAPVLVVYDDSDRPSGIPERFSGSNSGNTATLTISRVEAGDEADYYCQVWLSSNY

SEQ ID NO: 17268 - protein, 108 aa, Homo sapiens
SYALTQPPSVSVAPGQTARISCEGNIIGTRSVHWYQQRPGQAPVLVVYDDSDRPSGIPERFSGSNSGNTATLTISRVEAGDEADYYCQVWLSSNYQVIFGGGTELTVL

SEQ ID NO: 17269 - protein, 5 aa, Homo sapiens
SYAMG

SEQ ID NO: 17270 - protein, 5 aa, Homo sapiens
SYAMH

SEQ ID NO: 17271 - protein, 5 aa, Homo sapiens
SYAMM

SEQ ID NO: 17272 - protein, 5 aa, Homo sapiens
SYAMN

SEQ ID NO: 17273 - protein, 5 aa, Homo sapiens
SYAMR

SEQ ID NO: 17274 - protein, 5 aa, Homo sapiens
SYAMS

SEQ ID NO: 17275 - protein, 5 aa, Homo sapiens
SYAMT

SEQ ID NO: 17276 - protein, 5 aa, Homo sapiens
SYAMY

SEQ ID NO: 17277 - protein, 5 aa, Homo sapiens
SYAVI

SEQ ID NO: 17278 - protein, 5 aa, Homo sapiens
SYAVN

SEQ ID NO: 17279 - protein, 5 aa, Homo sapiens
SYAVS

SEQ ID NO: 17280 - protein, 95 aa, Homo sapiens
SYAVTQPLSVSVALGQTARITCGGNNIRSRNVHWYQQKPGQAPVVVIYRDRNRPSGIPERFSGSNSGNTATLTISRAQAGDEAEYYCQVWDRSTA

SEQ ID NO: 17281 - protein, 106 aa, Homo sapiens
SYAVTQPLSVSVALGQTARITCGGNNIRSRNVHWYQQKPGQAPVVVIYRDRNRPSGIPERFSGSNSGNTATLTISRAQAGDEAEYYCQVWDRSTAVFGGGTKLTVL

SEQ ID NO: 17282 - protein, 5 aa, Homo sapiens
SYDFS

SEQ ID NO: 17283 - protein, 5 aa, Homo sapiens
SYDII

SEQ ID NO: 17284 - protein, 5 aa, Homo sapiens
SYDIN

SEQ ID NO: 17285 - protein, 94 aa, Homo sapiens
SYDLTQPPSVSVSPGLTASITCSGDKLEDKFVCWYQLRPGQSPVLVIYQDNKRPSGIPARFTGSNSGNTATLTITRAQPVDEADYYCQTWDSAT

SEQ ID NO: 17286 - protein, 107 aa, Homo sapiens
SYDLTQPPSVSVSPGLTASITCSGDKLEDKFVCWYQLRPGQSPVLVIYQDNKRPSGIPARFTGSNSGNTATLTITRAQPVDEADYYCQTWDSATGGVFGGGTKLTVL

SEQ ID NO: 17287 - protein, 96 aa, Homo sapiens
SYDLTQPPSVSVSPGQTARITCSGDALPKQFAYWYQQKPGQAPVLVIYKDSERPSGIPERFSGSSSGTTVTLTISGVQAEDEADYYCQSADSSATY

SEQ ID NO: 17288 - protein, 109 aa, Homo sapiens
SYDLTQPPSVSVSPGQTARITCSGDALPKQFAYWYQQKPGQAPVLVIYKDSERPSGIPERFSGSSSGTTVTLTISGVQAEDEADYYCQSADSSATYAWVFGGGTKLTVL

SEQ ID NO: 17289 - protein, 96 aa, Homo sapiens
SYDLTQPPSVSVSPGQTARITCSGDALPKQYAYWYQQKLGQAPVLVIYKDSERPSGIPERFSGSSSGTTVTLTISGVQAEDEADYYCQSADSSATY

SEQ ID NO: 17290 - protein, 109 aa, Homo sapiens
SYDLTQPPSVSVSPGQTARITCSGDALPKQYAYWYQQKLGQAPVLVIYKDSERPSGIPERFSGSSSGTTVTLTISGVQAEDEADYYCQSADSSATYAWVFGGGTKLTVL

SEQ ID NO: 17291 - protein, 5 aa, Homo sapiens
SYDMH

SEQ ID NO: 17292 - protein, 5 aa, Homo sapiens
SYDWS

SEQ ID NO: 17293 - protein, 5 aa, Homo sapiens
SYEIN

SEQ ID NO: 17294 - protein, 96 aa, Homo sapiens
SYELAQPPSVSVSPGQTARITCSGDALPMKYAYWYQKKSGQAPVVVIYEDSKRPSGIPERFSGSNSETMATLTISGAQVEDEGDYYCFSTDSSGDH

SEQ ID NO: 17295 - protein, 108 aa, Homo sapiens
SYELAQPPSVSVSPGQTARITCSGDALPMKYAYWYQKKSGQAPVVVIYEDSKRPSGIPERFSGSNSETMATLTISGAQVEDEGDYYCFSTDSSGDHRVFGGGTKLTVL

SEQ ID NO: 17296 - protein, 94 aa, Homo sapiens
SYELIQPPSVSVSPGQTANITCSGEKLGEKYTCWFQQKPGQSPVLVIYQNDKRPSGIPERFSGSNSGNTATLTISGTQAMDEGDYYCQAWDSST

SEQ ID NO: 17297 - protein, 106 aa, Homo sapiens
SYELIQPPSVSVSPGQTANITCSGEKLGEKYTCWFQQKPGQSPVLVIYQNDKRPSGIPERFSGSNSGNTATLTISGTQAMDEGDYYCQAWDSSTSVFGGGTKLAAL

SEQ ID NO: 17298 - protein, 95 aa, Homo sapiens
SYELIQPPSVSVSPGQTATITCSGEKLGVKYASWYQQKPGQSPVLVVYQDNKRPSGIPERFSGSSSVNTATLTISGTQPMDEADYYCQAWDSDTA

SEQ ID NO: 17299 - protein, 106 aa, Homo sapiens
SYELIQPPSVSVSPGQTATITCSGEKLGVKYASWYQQKPGQSPVLVVYQDNKRPSGIPERFSGSSSVNTATLTISGTQPMDEADYYCQAWDSDTAIFGEGTKLTVL

SEQ ID NO: 17300 - protein, 95 aa, Homo sapiens
SYELRQPPSVSVSPGQTAQIPCSGDILTKEYAYWYQQRPGRAPVLIIYRVNERPSGIPDRFSGSNSGTRATLTISPVQGEDEADYFCQAGDNSGP

SEQ ID NO: 17301 - protein, 107 aa, Homo sapiens
SYELRQPPSVSVSPGQTAQIPCSGDILTKEYAYWYQQRPGRAPVLIIYRVNERPSGIPDRFSGSNSGTRATLTISPVQGEDEADYFCQAGDNSGPVIFGGGTKLSVL

SEQ ID NO: 17302 - protein, 94 aa, Homo sapiens
SYELTQPLSVSVALGQTARITCGGNNIGSKNVHWYQQKPGQAPVLVIYRDSNRPSGIPERFSGSNSGNTATLTISRAQAGDEADYYCQVWDSST

SEQ ID NO: 17303 - protein, 106 aa, Homo sapiens
SYELTQPLSVSVALGQTARITCGGNNIGSKNVHWYQQKPGQAPVLVIYRDSNRPSGIPERFSGSNSGNTATLTISRAQAGDEADYYCQVWDSSTVVFGGGTKLTVL

SEQ ID NO: 17304 - protein, 94 aa, Homo sapiens
SYELTQPLSVSVALGQTARITCGGNNIGSKNVHWYQQKPGQAPVLVIYRDSTRPSGIPGRFSGSNSGNTATLTINRAQAGDEADYYCQVWDSST

SEQ ID NO: 17305 - protein, 106 aa, Homo sapiens
SYELTQPLSVSVALGQTARITCGGNNIGSKNVHWYQQKPGQAPVLVIYRDSTRPSGIPGRFSGSNSGNTATLTINRAQAGDEADYYCQVWDSSTYVFGTGTKLTVL

SEQ ID NO: 17306 - protein, 94 aa, Homo sapiens
SYELTQPLSVSVALGQTARITCGGNNIGSKNVHWYQQRPGQAPILVIYRDAIRPSGTPGRFSGSNSGDTATLTISRAQAGDEADYYCHVWDSGT

SEQ ID NO: 17307 - protein, 106 aa, Homo sapiens
SYELTQPLSVSVALGQTARITCGGNNIGSKNVHWYQQRPGQAPILVIYRDAIRPSGTPGRFSGSNSGDTATLTISRAQAGDEADYYCHVWDSGTVVFGGGTKLTVL

SEQ ID NO: 17308 - protein, 95 aa, Homo sapiens
SYELTQPLSVSVDLGQTARITCGGNNIGSRNVHWYQQKPGQAPVLVIYRNNNRPSGIPERFSGSNSGNTATLTISRAQAGDEADYYCHVWDSSTA

SEQ ID NO: 17309 - protein, 106 aa, Homo sapiens
SYELTQPLSVSVDLGQTARITCGGNNIGSRNVHWYQQKPGQAPVLVIYRNNNRPSGIPERFSGSNSGNTATLTISRAQAGDEADYYCHVWDSSTAVFGGGTKLTVL

SEQ ID NO: 17310 - protein, 95 aa, Homo sapiens
SYELTQPPSLSVSPGQTASITCSGDRLGDKYTCWYQQKPGQSPVLVIYQDTRRPSGISERFSGSNSGNTAILTISGTQAMDEADYYCQAWDSSTA

SEQ ID NO: 17311 - protein, 108 aa, Homo sapiens
SYELTQPPSLSVSPGQTASITCSGDRLGDKYTCWYQQKPGQSPVLVIYQDTRRPSGISERFSGSNSGNTAILTISGTQAMDEADYYCQAWDSSTALYVFGTGTKVTVL

SEQ ID NO: 17312 - protein, 95 aa, Homo sapiens
SYELTQPPSMSVSPGQTARIACSGDALPKQYAYWYQQKPGRAPVLIIYKDTERPSGIPERFSASSSGTTATLTISGVKAEDEADYYCQSSDTSGT

SEQ ID NO: 17313 - protein, 108 aa, Homo sapiens
SYELTQPPSMSVSPGQTARIACSGDALPKQYAYWYQQKPGRAPVLIIYKDTERPSGIPERFSASSSGTTATLTISGVKAEDEADYYCQSSDTSGTIAVFGGGTKVTVL

SEQ ID NO: 17314 - protein, 91 aa, Homo sapiens
SYELTQPPSMSVSPGQTVGITCSGDNLSDTYVSWYQQRPGQSPILVISQDKERPSGIPERFSGSNSGNTATLTISGTQAIDEADYYCQTWD

SEQ ID NO: 17315 - protein, 107 aa, Homo sapiens
SYELTQPPSMSVSPGQTVGITCSGDNLSDTYVSWYQQRPGQSPILVISQDKERPSGIPERFSGSNSGNTATLTISGTQAIDEADYYCQTWDKKVGVVFGGGTKLAVL

SEQ ID NO: 17316 - protein, 96 aa, Homo sapiens
SYELTQPPSVSVSPGQTARITCSGDALANNYAYWYQQKPGQAPVLVILLDSERPSGIPERFSGSSSGTTVTLTISGVQPEDEADYYCQSADTTTSY

SEQ ID NO: 17317 - protein, 109 aa, Homo sapiens
SYELTQPPSVSVSPGQTARITCSGDALANNYAYWYQQKPGQAPVLVILLDSERPSGIPERFSGSSSGTTVTLTISGVQPEDEADYYCQSADTTTSYGGVFGGGTKLTVL

SEQ ID NO: 17318 - protein, 96 aa, Homo sapiens
SYELTQPPSVSVSPGQTARITCSGDALPHQFAYWYQQRPGQAPILVIYKDSERPSGIPERFSGSSSGTTVTLTISGVQADDEADYYCQSADSSGSY

SEQ ID NO: 17319 - protein, 108 aa, Homo sapiens
SYELTQPPSVSVSPGQTARITCSGDALPHQFAYWYQQRPGQAPILVIYKDSERPSGIPERFSGSSSGTTVTLTISGVQADDEADYYCQSADSSGSYVVFGGGTKLTVL

SEQ ID NO: 17320 - protein, 96 aa, Homo sapiens
SYELTQPPSVSVSPGQTARITCSGDALPKKYAYWYQQKPGQAPVLMINKDSERPSGIPERFSGSRSGTTVTLTISGVQAEDEADYYCQSADSSGSY

SEQ ID NO: 17321 - protein, 107 aa, Homo sapiens
SYELTQPPSVSVSPGQTARITCSGDALPKKYAYWYQQKPGQAPVLMINKDSERPSGIPERFSGSRSGTTVTLTISGVQAEDEADYYCQSADSSGSYVFGTGTKVTVL

SEQ ID NO: 17322 - protein, 96 aa, Homo sapiens
SYELTQPPSVSVSPGQTARITCSGDALPKKYAYWYQQKSGQAPVLVIYEDSKRPSGIPERFSGSSSGTMATLTISGAQVEDEADYYCYSTDSSGNH

SEQ ID NO: 17323 - protein, 108 aa, Homo sapiens
SYELTQPPSVSVSPGQTARITCSGDALPKKYAYWYQQKSGQAPVLVIYEDSKRPSGIPERFSGSSSGTMATLTISGAQVEDEADYYCYSTDSSGNHRVFGGGTKLTVL

SEQ ID NO: 17324 - protein, 95 aa, Homo sapiens
SYELTQPPSVSVSPGQTARITCSGDALPKQYAYWYQQKPGQAPVLVIYKDSERPSGIPERFSGSSSGTTVTLTISGVQAEDEADYYCQSADSSGT

SEQ ID NO: 17325 - protein, 96 aa, Homo sapiens
SYELTQPPSVSVSPGQTARITCSGDALPKQYAYWYQQKPGQAPVLVIYKDSERPSGIPERFSGSSSGTTVTLTISGVQAEDEADYYCQSADSSGTH

SEQ ID NO: 17326 - protein, 108 aa, Homo sapiens
SYELTQPPSVSVSPGQTARITCSGDALPKQYAYWYQQKPGQAPVLVIYKDSERPSGIPERFSGSSSGTTVTLTISGVQAEDEADYYCQSADSSGTHGVFGGGTKLTVL

SEQ ID NO: 17327 - protein, 107 aa, Homo sapiens
SYELTQPPSVSVSPGQTARITCSGDALPKQYAYWYQQKPGQAPVLVIYKDSERPSGIPERFSGSSSGTTVTLTISGVQAEDEADYYCQSADSSGTLVFGGGTKLTVL

SEQ ID NO: 17328 - protein, 108 aa, Homo sapiens
SYELTQPPSVSVSPGQTARITCSGDALPKQYAYWYQQKPGQAPVLVIYKDSERPSGIPERFSGSSSGTTVTLTISGVQAEDEADYYCQSADSSGTSVVFGGGTKLTVL

SEQ ID NO: 17329 - protein, 96 aa, Homo sapiens
SYELTQPPSVSVSPGQTARITCSGDALPKQYAYWYQQKPGQAPVLVIYKDSERPSGIPERFSGSSSGTTVTLTISGVQAEDEADYYCQSADSSGTY

SEQ ID NO: 17330 - protein, 97 aa, Homo sapiens
SYELTQPPSVSVSPGQTARITCSGDALPKQYAYWYQQKPGQAPVLVIYKDSERPSGIPERFSGSSSGTTVTLTISGVQAEDEADYYCQSADSSGTYP

SEQ ID NO: 17331 - protein, 109 aa, Homo sapiens
SYELTQPPSVSVSPGQTARITCSGDALPKQYAYWYQQKPGQAPVLVIYKDSERPSGIPERFSGSSSGTTVTLTISGVQAEDEADYYCQSADSSGTYPVVFGGGTKLTVL

SEQ ID NO: 17332 - protein, 108 aa, Homo sapiens
SYELTQPPSVSVSPGQTARITCSGDALPKQYAYWYQQKPGQAPVLVIYKDSERPSGIPERFSGSSSGTTVTLTISGVQAEDEADYYCQSADSSGTYVVFGGGTKLTVL

SEQ ID NO: 17333 - protein, 96 aa, Homo sapiens
SYELTQPPSVSVSPGQTARITCSGDALPKQYAYWYQQKPGQAPVLVIYRDNERPSGIPERISGSSSGTTVTLTISGVQAEDEADYYCQSTDSSGVY

SEQ ID NO: 17334 - protein, 107 aa, Homo sapiens
SYELTQPPSVSVSPGQTARITCSGDALPKQYAYWYQQKPGQAPVLVIYRDNERPSGIPERISGSSSGTTVTLTISGVQAEDEADYYCQSTDSSGVYVFGTGTKVTVL

SEQ ID NO: 17335 - protein, 96 aa, Homo sapiens
SYELTQPPSVSVSPGQTARITCSGDALPKQYAYWYQQKPGQAPVLVIYRDTERPSGIPERFSGSSSGTTVTLTISGVQAEDEADYYCQSTDSSGTY

SEQ ID NO: 17336 - protein, 108 aa, Homo sapiens
SYELTQPPSVSVSPGQTARITCSGDALPKQYAYWYQQKPGQAPVLVIYRDTERPSGIPERFSGSSSGTTVTLTISGVQAEDEADYYCQSTDSSGTYVVFGGGTKLTVL

SEQ ID NO: 17337 - protein, 91 aa, Homo sapiens
SYELTQPPSVSVSPGQTARITCSGDALPKQYAYWYQQKPGQAPVMVIYKDSERPSGIPERFSGSSSGTTVTLTISGVRAEDEAEYYCQSPG

SEQ ID NO: 17338 - protein, 107 aa, Homo sapiens
SYELTQPPSVSVSPGQTARITCSGDALPKQYAYWYQQKPGQAPVMVIYKDSERPSGIPERFSGSSSGTTVTLTISGVRAEDEAEYYCQSPGSDTLVVFGGGTKLTVL

SEQ ID NO: 17339 - protein, 96 aa, Homo sapiens
SYELTQPPSVSVSPGQTARITCSGDALPKQYAYWYQQKVGQAPILVIYRDTERPSGIPERFSGSSSGTTVTLTISGVQTEDEADYYCQSADTIDSY

SEQ ID NO: 17340 - protein, 110 aa, Homo sapiens
SYELTQPPSVSVSPGQTARITCSGDALPKQYAYWYQQKVGQAPILVIYRDTERPSGIPERFSGSSSGTTVTLTISGVQTEDEADYYCQSADTIDSYWGAVFGGGTKLTVL

SEQ ID NO: 17341 - protein, 96 aa, Homo sapiens
SYELTQPPSVSVSPGQTARITCSGDALPNQYANWYQQRPGQAPLLVIYKDSERSSRFPERFSGSSSGTTVTLIISGVQAEDEADYYCQSADTSGTY

SEQ ID NO: 17342 - protein, 108 aa, Homo sapiens
SYELTQPPSVSVSPGQTARITCSGDALPNQYANWYQQRPGQAPLLVIYKDSERSSRFPERFSGSSSGTTVTLIISGVQAEDEADYYCQSADTSGTYRVFGGGTKLTVL

SEQ ID NO: 17343 - protein, 95 aa, Homo sapiens
SYELTQPPSVSVSPGQTARITCSGDALPNQYASWYQQTPGQAPVVVIYKDSERPSGIPERFSGSSSGTTVTLTISGVQAEDEADYYCQSADSSGT

SEQ ID NO: 17344 - protein, 107 aa, Homo sapiens
SYELTQPPSVSVSPGQTARITCSGDALPNQYASWYQQTPGQAPVVVIYKDSERPSGIPERFSGSSSGTTVTLTISGVQAEDEADYYCQSADSSGTRVFGGGTKLTVL

SEQ ID NO: 17345 - protein, 94 aa, Homo sapiens
SYELTQPPSVSVSPGQTARITCSGDALPNQYAYWYQQKPGQAPVQVIYKDSERPSGIPERFSGSSSGTTVTLTISGVQAEDEGDYYCQSADSSG

SEQ ID NO: 17346 - protein, 106 aa, Homo sapiens
SYELTQPPSVSVSPGQTARITCSGDALPNQYAYWYQQKPGQAPVQVIYKDSERPSGIPERFSGSSSGTTVTLTISGVQAEDEGDYYCQSADSSGWVFGGGTKLTVL

SEQ ID NO: 17347 - protein, 96 aa, Homo sapiens
SYELTQPPSVSVSPGQTARITCSGDALPRQYTYWYQQKPGQAPILVIYRDTERPSGIPERFSGSSSGTTVTLTISGVQTEDEADYYCQSADTIDSY

SEQ ID NO: 17348 - protein, 110 aa, Homo sapiens
SYELTQPPSVSVSPGQTARITCSGDALPRQYTYWYQQKPGQAPILVIYRDTERPSGIPERFSGSSSGTTVTLTISGVQTEDEADYYCQSADTIDSYWGAVFGGGTKLTVL

SEQ ID NO: 17349 - protein, 96 aa, Homo sapiens
SYELTQPPSVSVSPGQTARITCSGDALPYKYAYWYQQKSGQAPVMVIYEDNKRPSGIPERFSASNSRTLATLTISGAQVEDEADYYCYSTDRSGNH

SEQ ID NO: 17350 - protein, 108 aa, Homo sapiens
SYELTQPPSVSVSPGQTARITCSGDALPYKYAYWYQQKSGQAPVMVIYEDNKRPSGIPERFSASNSRTLATLTISGAQVEDEADYYCYSTDRSGNHYVFGSGTKVTVL

SEQ ID NO: 17351 - protein, 95 aa, Homo sapiens
SYELTQPPSVSVSPGQTARITCSGDALSKQYAYWYQQKPGQAPVLVIYKDSERPSGIPERFSGSSSGTTVTLTISGVQAEDEADYYCQSADSSGT

SEQ ID NO: 17352 - protein, 107 aa, Homo sapiens
SYELTQPPSVSVSPGQTARITCSGDALSKQYAYWYQQKPGQAPVLVIYKDSERPSGIPERFSGSSSGTTVTLTISGVQAEDEADYYCQSADSSGTWVFGGGTKLTVL

SEQ ID NO: 17353 - protein, 90 aa, Homo sapiens
SYELTQPPSVSVSPGQTARITCSGDALSRQHAHWYQQKPGQAPILVIYKDNERPSGIPERFSGSSAGTTVTLTISGVQAEDESDYYCQST

SEQ ID NO: 17354 - protein, 108 aa, Homo sapiens
SYELTQPPSVSVSPGQTARITCSGDALSRQHAHWYQQKPGQAPILVIYKDNERPSGIPERFSGSSAGTTVTLTISGVQAEDESDYYCQSTSAHSSGRVFGGGTRLTVL

SEQ ID NO: 17355 - protein, 95 aa, Homo sapiens
SYELTQPPSVSVSPGQTARITCSGDTLGRNYASWYQQKPGQSPVLIIFEDNKRPSGIPERFSGSNSGNILTLTISGTQPMDEADYYCQAWDSTTP

SEQ ID NO: 17356 - protein, 107 aa, Homo sapiens
SYELTQPPSVSVSPGQTARITCSGDTLGRNYASWYQQKPGQSPVLIIFEDNKRPSGIPERFSGSNSGNILTLTISGTQPMDEADYYCQAWDSTTPEVFGGGTRLTVL

SEQ ID NO: 17357 - protein, 95 aa, Homo sapiens
SYELTQPPSVSVSPGQTARITCSGDTLGRNYASWYQQKPGQSPVLVIFEDNKRPSGIPERFSGSNSGNILTLTISETQPMDEADYYCQAWDSTTP

SEQ ID NO: 17358 - protein, 107 aa, Homo sapiens
SYELTQPPSVSVSPGQTARITCSGDTLGRNYASWYQQKPGQSPVLVIFEDNKRPSGIPERFSGSNSGNILTLTISETQPMDEADYYCQAWDSTTPEVFGGGTRLTVL

SEQ ID NO: 17359 - protein, 95 aa, Homo sapiens
SYELTQPPSVSVSPGQTARITCSGDTLPNQFAYWYQQKPGQAPVLVIYQDTERPSGIPERFSGSTSGTTVTLTISGVQAEDEAEYYCQGADTSGT

SEQ ID NO: 17360 - protein, 106 aa, Homo sapiens
SYELTQPPSVSVSPGQTARITCSGDTLPNQFAYWYQQKPGQAPVLVIYQDTERPSGIPERFSGSTSGTTVTLTISGVQAEDEAEYYCQGADTSGTGFGGGTKLTVL

SEQ ID NO: 17361 - protein, 95 aa, Homo sapiens
SYELTQPPSVSVSPGQTASITCFGDKLGDKYACWYQQKPGQSPALVIYQDNKRPSGIPERFSGSNSGNTATLTISGTQATDEGDYYCQAWDRSTA

SEQ ID NO: 17362 - protein, 106 aa, Homo sapiens
SYELTQPPSVSVSPGQTASITCFGDKLGDKYACWYQQKPGQSPALVIYQDNKRPSGIPERFSGSNSGNTATLTISGTQATDEGDYYCQAWDRSTAVFGTGTKVTVL

SEQ ID NO: 17363 - protein, 94 aa, Homo sapiens
SYELTQPPSVSVSPGQTASITCSGDKLGDKFACWYQQKPGQSPVLLVYQNNKRPSGIPERFSGCNSGNTATLTISGTQAVDEADYYCQAWDSNT

SEQ ID NO: 17364 - protein, 106 aa, Homo sapiens
SYELTQPPSVSVSPGQTASITCSGDKLGDKFACWYQQKPGQSPVLLVYQNNKRPSGIPERFSGCNSGNTATLTISGTQAVDEADYYCQAWDSNTVVFGGGTKLTVL

SEQ ID NO: 17365 - protein, 95 aa, Homo sapiens
SYELTQPPSVSVSPGQTASITCSGDKLGDKYACWYHQKPGQSPVLVIYQDTKRPSGIPERFSGSNSGNTATLTISGTQSMDEADYYCQAWDSSTA

SEQ ID NO: 17366 - protein, 107 aa, Homo sapiens
SYELTQPPSVSVSPGQTASITCSGDKLGDKYACWYHQKPGQSPVLVIYQDTKRPSGIPERFSGSNSGNTATLTISGTQSMDEADYYCQAWDSSTAVVFGGGTKLTVL

SEQ ID NO: 17367 - protein, 94 aa, Homo sapiens
SYELTQPPSVSVSPGQTASITCSGDKLGDKYACWYQQKPGQSPMLVIYQDTKRPSGIPERFSGSNSGNTATLTISGTQAMDEADYYCQAWDSST

SEQ ID NO: 17368 - protein, 106 aa, Homo sapiens
SYELTQPPSVSVSPGQTASITCSGDKLGDKYACWYQQKPGQSPMLVIYQDTKRPSGIPERFSGSNSGNTATLTISGTQAMDEADYYCQAWDSSTGVFGGGTKLTVL

SEQ ID NO: 17369 - protein, 94 aa, Homo sapiens
SYELTQPPSVSVSPGQTASITCSGDKLGDKYACWYQQKPGQSPVLVIYEDNKRPSGIPERFSGSNSGNTATLTISGTQAMDEADYYCQAWDSST

SEQ ID NO: 17370 - protein, 107 aa, Homo sapiens
SYELTQPPSVSVSPGQTASITCSGDKLGDKYACWYQQKPGQSPVLVIYEDNKRPSGIPERFSGSNSGNTATLTISGTQAMDEADYYCQAWDSSTEVVFGTGTKVTVL

SEQ ID NO: 17371 - protein, 94 aa, Homo sapiens
SYELTQPPSVSVSPGQTASITCSGDKLGDKYACWYQQKPGQSPVLVIYQDNKRPSGIPERFSGSNSGNTATLTISGTQTMDEADYYCQAWDSST

SEQ ID NO: 17372 - protein, 108 aa, Homo sapiens
SYELTQPPSVSVSPGQTASITCSGDKLGDKYACWYQQKPGQSPVLVIYQDNKRPSGIPERFSGSNSGNTATLTISGTQTMDEADYYCQAWDSSTSHVVFGGGTKLTVL

SEQ ID NO: 17373 - protein, 93 aa, Homo sapiens
SYELTQPPSVSVSPGQTASITCSGDKLGDKYACWYQQKPGQSPVLVIYQDSKRPSGIPERFSGSNSANTATLTISGTQAMDEADYYCQAWDSS

SEQ ID NO: 17374 - protein, 107 aa, Homo sapiens
SYELTQPPSVSVSPGQTASITCSGDKLGDKYACWYQQKPGQSPVLVIYQDSKRPSGIPERFSGSNSANTATLTISGTQAMDEADYYCQAWDSSSLYVFGTGTKVTVL

SEQ ID NO: 17375 - protein, 93 aa, Homo sapiens
SYELTQPPSVSVSPGQTASITCSGDKLGDKYACWYQQKPGQSPVLVIYQDSKRPSGIPERFSGSNSGNTATLTISGTQAMDEADYYCQAWDSS

SEQ ID NO: 17376 - protein, 107 aa, Homo sapiens
SYELTQPPSVSVSPGQTASITCSGDKLGDKYACWYQQKPGQSPVLVIYQDSKRPSGIPERFSGSNSGNTATLTISGTQAMDEADYYCQAWDSSIFYVFGTGTKVTVL

SEQ ID NO: 17377 - protein, 94 aa, Homo sapiens
SYELTQPPSVSVSPGQTASITCSGDKLGDKYACWYQQKPGQSPVLVIYQDSKRPSGIPERFSGSNSGNTATLTISGTQAMDEADYYCQAWDSST

SEQ ID NO: 17378 - protein, 95 aa, Homo sapiens
SYELTQPPSVSVSPGQTASITCSGDKLGDKYACWYQQKPGQSPVLVIYQDSKRPSGIPERFSGSNSGNTATLTISGTQAMDEADYYCQAWDSSTA

SEQ ID NO: 17379 - protein, 108 aa, Homo sapiens
SYELTQPPSVSVSPGQTASITCSGDKLGDKYACWYQQKPGQSPVLVIYQDSKRPSGIPERFSGSNSGNTATLTISGTQAMDEADYYCQAWDSSTAGVVFGGGTKLTVL

SEQ ID NO: 17380 - protein, 106 aa, Homo sapiens
SYELTQPPSVSVSPGQTASITCSGDKLGDKYACWYQQKPGQSPVLVIYQDSKRPSGIPERFSGSNSGNTATLTISGTQAMDEADYYCQAWDSSTAVFGGGTKLTVL

SEQ ID NO: 17381 - protein, 107 aa, Homo sapiens
SYELTQPPSVSVSPGQTASITCSGDKLGDKYACWYQQKPGQSPVLVIYQDSKRPSGIPERFSGSNSGNTATLTISGTQAMDEADYYCQAWDSSTAWIFGTGTKVTVL

SEQ ID NO: 17382 - protein, 107 aa, Homo sapiens
SYELTQPPSVSVSPGQTASITCSGDKLGDKYACWYQQKPGQSPVLVIYQDSKRPSGIPERFSGSNSGNTATLTISGTQAMDEADYYCQAWDSSTAYVFGGGTKLTVL

SEQ ID NO: 17383 - protein, 107 aa, Homo sapiens
SYELTQPPSVSVSPGQTASITCSGDKLGDKYACWYQQKPGQSPVLVIYQDSKRPSGIPERFSGSNSGNTATLTISGTQAMDEADYYCQAWDSSTDVVFGGGTKLTVL

SEQ ID NO: 17384 - protein, 106 aa, Homo sapiens
SYELTQPPSVSVSPGQTASITCSGDKLGDKYACWYQQKPGQSPVLVIYQDSKRPSGIPERFSGSNSGNTATLTISGTQAMDEADYYCQAWDSSTGVFGTGTKVTVL

SEQ ID NO: 17385 - protein, 107 aa, Homo sapiens
SYELTQPPSVSVSPGQTASITCSGDKLGDKYACWYQQKPGQSPVLVIYQDSKRPSGIPERFSGSNSGNTATLTISGTQAMDEADYYCQAWDSSTHVVFGGGTKLTVL

SEQ ID NO: 17386 - protein, 107 aa, Homo sapiens
SYELTQPPSVSVSPGQTASITCSGDKLGDKYACWYQQKPGQSPVLVIYQDSKRPSGIPERFSGSNSGNTATLTISGTQAMDEADYYCQAWDSSTPVVFGGGTKLTVL

SEQ ID NO: 17387 - protein, 106 aa, Homo sapiens
SYELTQPPSVSVSPGQTASITCSGDKLGDKYACWYQQKPGQSPVLVIYQDSKRPSGIPERFSGSNSGNTATLTISGTQAMDEADYYCQAWDSSTVVFGGGTKLTVL

SEQ ID NO: 17388 - protein, 105 aa, Homo sapiens
SYELTQPPSVSVSPGQTASITCSGDKLGDKYACWYQQKPGQSPVLVIYQDSKRPSGIPERFSGSNSGNTATLTISGTQAMDEADYYCQAWDSSVVFGGGTKLTVL

SEQ ID NO: 17389 - protein, 91 aa, Homo sapiens
SYELTQPPSVSVSPGQTASITCSGDKLGDKYACWYQQKPGQSPVLVIYQDTKRPSGIPERFSGSNSGNTATLTISGTQAMDEADYYCQAWD

SEQ ID NO: 17390 - protein, 106 aa, Homo sapiens
SYELTQPPSVSVSPGQTASITCSGDKLGDKYACWYQQKPGQSPVLVIYQDTKRPSGIPERFSGSNSGNTATLTISGTQAMDEADYYCQAWDRGLWVFGGGTKLTVL

SEQ ID NO: 17391 - protein, 94 aa, Homo sapiens
SYELTQPPSVSVSPGQTASITCSGDKLGDKYASWYQQKPGQSPMLVIYQDTKRPSGIPERFSGSNSGNTATLTIAGTQTMDEADYYCQAWDTST

SEQ ID NO: 17392 - protein, 108 aa, Homo sapiens
SYELTQPPSVSVSPGQTASITCSGDKLGDKYASWYQQKPGQSPMLVIYQDTKRPSGIPERFSGSNSGNTATLTIAGTQTMDEADYYCQAWDTSTVRYVFGTGTKITVL

SEQ ID NO: 17393 - protein, 94 aa, Homo sapiens
SYELTQPPSVSVSPGQTASITCSGDKLGDKYASWYQQKPGQSPVVVIHQDSKRPSGIPERFSGSNSGNTATLTISGTQAMDEADYYCQAWDSST

SEQ ID NO: 17394 - protein, 107 aa, Homo sapiens
SYELTQPPSVSVSPGQTASITCSGDKLGDKYASWYQQKPGQSPVVVIHQDSKRPSGIPERFSGSNSGNTATLTISGTQAMDEADYYCQAWDSSTYVVFGGGTKLTVL

SEQ ID NO: 17395 - protein, 94 aa, Homo sapiens
SYELTQPPSVSVSPGQTASITCSGDKLGDKYTCWYQQKPGQSPVLVIYQDTKRPSGIPERFSGSNSGNTVTLTISGTQAMDEADYYCQTWDSST

SEQ ID NO: 17396 - protein, 106 aa, Homo sapiens
SYELTQPPSVSVSPGQTASITCSGDKLGDKYTCWYQQKPGQSPVLVIYQDTKRPSGIPERFSGSNSGNTVTLTISGTQAMDEADYYCQTWDSSTVVFGGGTKLTVL

SEQ ID NO: 17397 - protein, 95 aa, Homo sapiens
SYELTQPPSVSVSPGQTASITCSGDNLGDKYACWYQQKPGQSPVLVIYQDSKRPSGIPERFSGSNSGNTATLTISGTQAMDEADYYCQAWDTSTA

SEQ ID NO: 17398 - protein, 108 aa, Homo sapiens
SYELTQPPSVSVSPGQTASITCSGDNLGDKYACWYQQKPGQSPVLVIYQDSKRPSGIPERFSGSNSGNTATLTISGTQAMDEADYYCQAWDTSTANVVFGGGTKLTVL

SEQ ID NO: 17399 - protein, 94 aa, Homo sapiens
SYELTQPPSVSVSPGQTASITCSGDQLGDKYASWYQQKPGQSPVLVLYQDNKRPSGIPERFSGSNSGNTATLTISGTQAMDEADYYCQAWDSNT

SEQ ID NO: 17400 - protein, 106 aa, Homo sapiens
SYELTQPPSVSVSPGQTASITCSGDQLGDKYASWYQQKPGQSPVLVLYQDNKRPSGIPERFSGSNSGNTATLTISGTQAMDEADYYCQAWDSNTGVFGSGTRVIVL

SEQ ID NO: 17401 - protein, 94 aa, Homo sapiens
SYELTQPPSVSVSPGQTASITCSGEKLGEKYCSWYQQKPGQSPLMVIYEDTKRPSGIPERFSGSNSGNATTLTISGTQAMDEADYYCQAWDSTT

SEQ ID NO: 17402 - protein, 106 aa, Homo sapiens
SYELTQPPSVSVSPGQTASITCSGEKLGEKYCSWYQQKPGQSPLMVIYEDTKRPSGIPERFSGSNSGNATTLTISGTQAMDEADYYCQAWDSTTDVFGGGTKLTVL

SEQ ID NO: 17403 - protein, 94 aa, Homo sapiens
SYELTQPPSVSVSPGQTASITCSGHKLGDKYASWYQQKSGQSPVLVIYRDIQRPSGTPERFSGSSSGNTATLTISGTQALDEADYYCQTWHNNT

SEQ ID NO: 17404 - protein, 106 aa, Homo sapiens
SYELTQPPSVSVSPGQTASITCSGHKLGDKYASWYQQKSGQSPVLVIYRDIQRPSGTPERFSGSSSGNTATLTISGTQALDEADYYCQTWHNNTVIFGGGTKLTVL

SEQ ID NO: 17405 - protein, 96 aa, Homo sapiens
SYELTQPPSVSVSPGQTATITCSGDALPKQYAYWYQQRPGQAPILLIYKDSERPSGIPERFSGSNSGTAVTLTISGVQAEDEADYYCQSADSSGTY

SEQ ID NO: 17406 - protein, 108 aa, Homo sapiens
SYELTQPPSVSVSPGQTATITCSGDALPKQYAYWYQQRPGQAPILLIYKDSERPSGIPERFSGSNSGTAVTLTISGVQAEDEADYYCQSADSSGTYVVFGGGTKLTVL

SEQ ID NO: 17407 - protein, 95 aa, Homo sapiens
SYELTQPPSVSVSPGQTATITCSGDKLGDKYACWYQQKPGQSPVLVIYQDSKRPSGIPERFSGSNSGNTATLTISGTRAMDEADYYCQAWDSSTA

SEQ ID NO: 17408 - protein, 107 aa, Homo sapiens
SYELTQPPSVSVSPGQTATITCSGDKLGDKYACWYQQKPGQSPVLVIYQDSKRPSGIPERFSGSNSGNTATLTISGTRAMDEADYYCQAWDSSTAVVFGGGTKLTVL

SEQ ID NO: 17409 - protein, 94 aa, Homo sapiens
SYELTQPPSVSVSPGQTVSITCSGDELGHKYASWYQQKPGQSPVLVIYQDIKRPSGIPERFSGSNSGNTATLTISGTQATDEADYYCQAWDRNT

SEQ ID NO: 17410 - protein, 107 aa, Homo sapiens
SYELTQPPSVSVSPGQTVSITCSGDELGHKYASWYQQKPGQSPVLVIYQDIKRPSGIPERFSGSNSGNTATLTISGTQATDEADYYCQAWDRNTEVVFGGGTKLTVL

SEQ ID NO: 17411 - protein, 92 aa, Homo sapiens
SYELTQPSSASVSPGQTARITCSGDILAKKYARWFQQKPGQAPVLVIYKDSERPSGIPERFSGSSSGTTVTLTITGAQVEDEADYYCYSAAD

SEQ ID NO: 17412 - protein, 107 aa, Homo sapiens
SYELTQPSSASVSPGQTARITCSGDILAKKYARWFQQKPGQAPVLVIYKDSERPSGIPERFSGSSSGTTVTLTITGAQVEDEADYYCYSAADNSRRVFGGGTKLTVL

SEQ ID NO: 17413 - protein, 93 aa, Homo sapiens
SYELTQPSSVSVSPGQTAKITCSGDVLTKRYPRWFQQKPGQAPVLVIYKDSERPSGIPERFSGSRSGTTVTLTISGAQVEDEADYYCYSATDN

SEQ ID NO: 17414 - protein, 105 aa, Homo sapiens
SYELTQPSSVSVSPGQTAKITCSGDVLTKRYPRWFQQKPGQAPVLVIYKDSERPSGIPERFSGSRSGTTVTLTISGAQVEDEADYYCYSATDNTWVFGGGTKLTV

SEQ ID NO: 17415 - protein, 93 aa, Homo sapiens
SYELTQPSSVSVSPGQTARITCSGDLLTNKYARWFRQRPGQAPLVLIYKDTERPSGIPERFSGSISGTTVTLTISGARLEDEGEYYCYSASDN

SEQ ID NO: 17416 - protein, 106 aa, Homo sapiens
SYELTQPSSVSVSPGQTARITCSGDLLTNKYARWFRQRPGQAPLVLIYKDTERPSGIPERFSGSISGTTVTLTISGARLEDEGEYYCYSASDNIVFLGGGTKLTVL

SEQ ID NO: 17417 - protein, 93 aa, Homo sapiens
SYELTQPSSVSVSPGQTARITCSGDVLAKKYARWFQQKPGQAPVLVIYKDSERPSGIPERFSGSSSGTTVTLTISGAQVEDEADYYCYSAADN

SEQ ID NO: 17418 - protein, 94 aa, Homo sapiens
SYELTQPSSVSVSPGQTARITCSGDVLAKKYARWFQQKPGQAPVLVIYKDSERPSGIPERFSGSSSGTTVTLTISGAQVEDEADYYCYSAADNN

SEQ ID NO: 17419 - protein, 107 aa, Homo sapiens
SYELTQPSSVSVSPGQTARITCSGDVLAKKYARWFQQKPGQAPVLVIYKDSERPSGIPERFSGSSSGTTVTLTISGAQVEDEADYYCYSAADNNPPVFGTGTKVTVL

SEQ ID NO: 17420 - protein, 106 aa, Homo sapiens
SYELTQPSSVSVSPGQTARITCSGDVLAKKYARWFQQKPGQAPVLVIYKDSERPSGIPERFSGSSSGTTVTLTISGAQVEDEADYYCYSAADNSWVFGGGTKLTVL

SEQ ID NO: 17421 - protein, 92 aa, Homo sapiens
SYELTQPSSVSVSPGQTARITCSGNVLAKKYARWFQQKPGQAPVLLIYQDTERPSGIPERFSGSSSGTTVTLTISGAQVEDEADYYCYSVAD

SEQ ID NO: 17422 - protein, 107 aa, Homo sapiens
SYELTQPSSVSVSPGQTARITCSGNVLAKKYARWFQQKPGQAPVLLIYQDTERPSGIPERFSGSSSGTTVTLTISGAQVEDEADYYCYSVADRTVRFFGGGTKLTVL

SEQ ID NO: 17423 - protein, 93 aa, Homo sapiens
SYELTQPSSVSVSPGQTASITCSGDILTKKYARWFQQKPGQAPILVIYKDNERPSGIPERFSGSSSGTTVTLTISGAQVEDEADYYCYSAADN

SEQ ID NO: 17424 - protein, 106 aa, Homo sapiens
SYELTQPSSVSVSPGQTASITCSGDILTKKYARWFQQKPGQAPILVIYKDNERPSGIPERFSGSSSGTTVTLTISGAQVEDEADYYCYSAADNIGVFGTGTKVTVL

SEQ ID NO: 17425 - protein, 93 aa, Homo sapiens
SYELTQPSSVSVSPGQTASITCSGDILTKKYARWFQQKPGQAPILVIYKDNERPSGIPERFSGSSSGTTVTLTITGAQVEDEADYYCYSAADN

SEQ ID NO: 17426 - protein, 106 aa, Homo sapiens
SYELTQPSSVSVSPGQTASITCSGDILTKKYARWFQQKPGQAPILVIYKDNERPSGIPERFSGSSSGTTVTLTITGAQVEDEADYYCYSAADNKGVFGTGTKVTVL

SEQ ID NO: 17427 - protein, 93 aa, Homo sapiens
SYELTQPSSVSVSPGQTASITCSGDLLAKKYARWFQQKPGQAPVLVIYKDNERPSGIPERFSGSSSGTTVTLTISGAQVDDEADYYCYSAADN

SEQ ID NO: 17428 - protein, 106 aa, Homo sapiens
SYELTQPSSVSVSPGQTASITCSGDLLAKKYARWFQQKPGQAPVLVIYKDNERPSGIPERFSGSSSGTTVTLTISGAQVDDEADYYCYSAADNKGVFGTGTKVTVL

SEQ ID NO: 17429 - protein, 94 aa, Homo sapiens
SYELTQPTSVSVSPGQTATITCSGDKLGSEYVSWYQQKAGQSPVLVIYQDSQRPSGIPERFSGSSSGNTATLTIRGTQTLDEADYHCQAWDIPT

SEQ ID NO: 17430 - protein, 106 aa, Homo sapiens
SYELTQPTSVSVSPGQTATITCSGDKLGSEYVSWYQQKAGQSPVLVIYQDSQRPSGIPERFSGSSSGNTATLTIRGTQTLDEADYHCQAWDIPTVIFGGGTKLTVL

SEQ ID NO: 17431 - protein, 5 aa, Homo sapiens
SYEMH

SEQ ID NO: 17432 - protein, 5 aa, Homo sapiens
SYEMN

SEQ ID NO: 17433 - protein, 5 aa, Homo sapiens
SYFMN

SEQ ID NO: 17434 - protein, 10 aa, Homo sapiens
SYGAGSYLMI

SEQ ID NO: 17435 - protein, 5 aa, Homo sapiens
SYGFI

SEQ ID NO: 17436 - protein, 5 aa, Homo sapiens
SYGFN

SEQ ID NO: 17437 - protein, 5 aa, Homo sapiens
SYGFS

SEQ ID NO: 17438 - protein, 5 aa, Homo sapiens
SYGFT

SEQ ID NO: 17439 - protein, 5 aa, Homo sapiens
SYGIH

SEQ ID NO: 17440 - protein, 5 aa, Homo sapiens
SYGIN

SEQ ID NO: 17441 - protein, 5 aa, Homo sapiens
SYGIS

SEQ ID NO: 17442 - protein, 5 aa, Homo sapiens
SYGLS

SEQ ID NO: 17443 - protein, 5 aa, Homo sapiens
SYGMH

SEQ ID NO: 17444 - protein, 5 aa, Homo sapiens
SYGMN

SEQ ID NO: 17445 - protein, 5 aa, Homo sapiens
SYGMQ

SEQ ID NO: 17446 - protein, 5 aa, Homo sapiens
SYGMS

SEQ ID NO: 17447 - protein, 5 aa, Homo sapiens
SYGMY

SEQ ID NO: 17448 - protein, 5 aa, Homo sapiens
SYGVH

SEQ ID NO: 17449 - protein, 5 aa, Homo sapiens
SYGVS

SEQ ID NO: 17450 - protein, 10 aa, Homo sapiens
SYGYFGGFDH

SEQ ID NO: 17451 - protein, 5 aa, Homo sapiens
SYIIN

SEQ ID NO: 17452 - protein, 5 aa, Homo sapiens
SYIMA

SEQ ID NO: 17453 - protein, 5 aa, Homo sapiens
SYLIN

SEQ ID NO: 17454 - protein, 5 aa, Homo sapiens
SYLMH

SEQ ID NO: 17455 - protein, 5 aa, Homo sapiens
SYNMK

SEQ ID NO: 17456 - protein, 5 aa, Homo sapiens
SYNMN

SEQ ID NO: 17457 - protein, 5 aa, Homo sapiens
SYPIS

SEQ ID NO: 17458 - protein, 14 aa, Homo sapiens
SYPPVMTAIGYFDL

SEQ ID NO: 17459 - protein, 5 aa, Homo sapiens
SYSFD

SEQ ID NO: 17460 - protein, 5 aa, Homo sapiens
SYSFI

SEQ ID NO: 17461 - protein, 5 aa, Homo sapiens
SYSFN

SEQ ID NO: 17462 - protein, 5 aa, Homo sapiens
SYSIN

SEQ ID NO: 17463 - protein, 5 aa, Homo sapiens
SYSIS

SEQ ID NO: 17464 - protein, 5 aa, Homo sapiens
SYSMH

SEQ ID NO: 17465 - protein, 5 aa, Homo sapiens
SYSMI

SEQ ID NO: 17466 - protein, 5 aa, Homo sapiens
SYSMN

SEQ ID NO: 17467 - protein, 5 aa, Homo sapiens
SYSMT

SEQ ID NO: 17468 - protein, 5 aa, Homo sapiens
SYSVS

SEQ ID NO: 17469 - protein, 5 aa, Homo sapiens
SYSVT

SEQ ID NO: 17470 - protein, 5 aa, Homo sapiens
SYSWS

SEQ ID NO: 17471 - protein, 5 aa, Homo sapiens
SYTFN

SEQ ID NO: 17472 - protein, 5 aa, Homo sapiens
SYTFT

SEQ ID NO: 17473 - protein, 5 aa, Homo sapiens
SYTIN

SEQ ID NO: 17474 - protein, 5 aa, Homo sapiens
SYTIS

SEQ ID NO: 17475 - protein, 5 aa, Homo sapiens
SYTMN

SEQ ID NO: 17476 - protein, 5 aa, Homo sapiens
SYTMT

SEQ ID NO: 17477 - protein, 5 aa, Homo sapiens
SYTVT

SEQ ID NO: 17478 - protein, 5 aa, Homo sapiens
SYVIS

SEQ ID NO: 17479 - protein, 5 aa, Homo sapiens
SYVLH

SEQ ID NO: 17480 - protein, 96 aa, Homo sapiens
SYVLIQPPSVSAAPGKTAGITCGGNNIGIKSVHWYQQKPGQAPVLVIFDNSDRPSGIPERFSGSNSGNTATLTISRVEAGDEADYYCQVWDSTSDH

SEQ ID NO: 17481 - protein, 108 aa, Homo sapiens
SYVLIQPPSVSAAPGKTAGITCGGNNIGIKSVHWYQQKPGQAPVLVIFDNSDRPSGIPERFSGSNSGNTATLTISRVEAGDEADYYCQVWDSTSDHVVFGGGTKLTVL

SEQ ID NO: 17482 - protein, 96 aa, Homo sapiens
SYVLPQPPSVSVAPGKTARIPCGGTNIGSKSVHWYQQKPGQAPVLVIYDNSDRPSGIPERFSGSNSGNTATLTISRVEAGDEADYYCQFWDSSTDL

SEQ ID NO: 17483 - protein, 109 aa, Homo sapiens
SYVLPQPPSVSVAPGKTARIPCGGTNIGSKSVHWYQQKPGQAPVLVIYDNSDRPSGIPERFSGSNSGNTATLTISRVEAGDEADYYCQFWDSSTDLLYVFGTGTKVTVL

SEQ ID NO: 17484 - protein, 96 aa, Homo sapiens
SYVLTQPPSLSVAPGTTARISCGGDNIGSESVNWYQQKPGQAPVLVIYYDNDRPSEIPERFSGSNSGHTATLTITRVEAGDEADYYCQVWHGNSDH

SEQ ID NO: 17485 - protein, 108 aa, Homo sapiens
SYVLTQPPSLSVAPGTTARISCGGDNIGSESVNWYQQKPGQAPVLVIYYDNDRPSEIPERFSGSNSGHTATLTITRVEAGDEADYYCQVWHGNSDHGLFGGGTKLTVL

SEQ ID NO: 17486 - protein, 95 aa, Homo sapiens
SYVLTQPPSMSVAPGQTARISCGGDIIERRSVHWYQQKPGQAPVLVVYDYNDRPSGIPERFSGSKSGNTATLTISRVEAGDEADYYCQVWVDSTG

SEQ ID NO: 17487 - protein, 108 aa, Homo sapiens
SYVLTQPPSMSVAPGQTARISCGGDIIERRSVHWYQQKPGQAPVLVVYDYNDRPSGIPERFSGSKSGNTATLTISRVEAGDEADYYCQVWVDSTGRVLFGGGTELTVL

SEQ ID NO: 17488 - protein, 96 aa, Homo sapiens
SYVLTQPPSVSVAPGKTANITCGGSNIGSKTVHWYQQKPGQVPVLVVYDDSDRPSSIPERFSGSNSGNTATLTISTVEAGDEADYYCQVWESSSEP

SEQ ID NO: 17489 - protein, 109 aa, Homo sapiens
SYVLTQPPSVSVAPGKTANITCGGSNIGSKTVHWYQQKPGQVPVLVVYDDSDRPSSIPERFSGSNSGNTATLTISTVEAGDEADYYCQVWESSSEPHVVFGGGTKLTVL

SEQ ID NO: 17490 - protein, 95 aa, Homo sapiens
SYVLTQPPSVSVAPGKTARITCGGNDVGSKSVHWYQQKPGQAPVLVLYDNSDRPSGIPERFSGSNSGNTATLTISRVEAGDEADYYCQVWDKSSD

SEQ ID NO: 17491 - protein, 108 aa, Homo sapiens
SYVLTQPPSVSVAPGKTARITCGGNDVGSKSVHWYQQKPGQAPVLVLYDNSDRPSGIPERFSGSNSGNTATLTISRVEAGDEADYYCQVWDKSSDHWVFGGGTKLTVL

SEQ ID NO: 17492 - protein, 95 aa, Homo sapiens
SYVLTQPPSVSVAPGKTARITCGGNDVTSKSVHWYQQKPGQAPVLVLYDNSDRPSGIPERFSGSNSGNTATLTISRVEAGDEADYYCQVWDKSSD

SEQ ID NO: 17493 - protein, 108 aa, Homo sapiens
SYVLTQPPSVSVAPGKTARITCGGNDVTSKSVHWYQQKPGQAPVLVLYDNSDRPSGIPERFSGSNSGNTATLTISRVEAGDEADYYCQVWDKSSDHWVFGGGTKLTVL

SEQ ID NO: 17494 - protein, 97 aa, Homo sapiens
SYVLTQPPSVSVAPGKTARITCGGNNIGNKSVHWYQQKPGQAPVLVVYDDSDRPSGIPERFSGSNSGNTATLTISRVEAGDEADYYCQVWDSSSDHP

SEQ ID NO: 17495 - protein, 109 aa, Homo sapiens
SYVLTQPPSVSVAPGKTARITCGGNNIGNKSVHWYQQKPGQAPVLVVYDDSDRPSGIPERFSGSNSGNTATLTISRVEAGDEADYYCQVWDSSSDHPYVFGTGTNVPVL

SEQ ID NO: 17496 - protein, 97 aa, Homo sapiens
SYVLTQPPSVSVAPGKTARITCGGNNIGSKSVHWYQQKPGQAPVLVIYDDSDRPSGIPERFSGSNSGNTATLTISRVEAGDEADYYCQVWDSSSDHP

SEQ ID NO: 17497 - protein, 108 aa, Homo sapiens
SYVLTQPPSVSVAPGKTARITCGGNNIGSKSVHWYQQKPGQAPVLVIYDDSDRPSGIPERFSGSNSGNTATLTISRVEAGDEADYYCQVWDSSSDHPLFGGGTKLTVL

SEQ ID NO: 17498 - protein, 109 aa, Homo sapiens
SYVLTQPPSVSVAPGKTARITCGGNNIGSKSVHWYQQKPGQAPVLVIYDDSDRPSGIPERFSGSNSGNTATLTISRVEAGDEADYYCQVWDSSSDHPYVFGTGTKVTVL

SEQ ID NO: 17499 - protein, 95 aa, Homo sapiens
SYVLTQPPSVSVAPGKTARITCGGNNIGSKSVHWYQQKPGQAPVLVIYYDSDRPSGIPERFSGSNSGNTATLTISRVEAGDEADYYCQVWDSSSD

SEQ ID NO: 17500 - protein, 96 aa, Homo sapiens
SYVLTQPPSVSVAPGKTARITCGGNNIGSKSVHWYQQKPGQAPVLVIYYDSDRPSGIPERFSGSNSGNTATLTISRVEAGDEADYYCQVWDSSSDH

SEQ ID NO: 17501 - protein, 108 aa, Homo sapiens
SYVLTQPPSVSVAPGKTARITCGGNNIGSKSVHWYQQKPGQAPVLVIYYDSDRPSGIPERFSGSNSGNTATLTISRVEAGDEADYYCQVWDSSSDHVVFGGGTKLTVL

SEQ ID NO: 17502 - protein, 108 aa, Homo sapiens
SYVLTQPPSVSVAPGKTARITCGGNNIGSKSVHWYQQKPGQAPVLVIYYDSDRPSGIPERFSGSNSGNTATLTISRVEAGDEADYYCQVWDSSSDHYVFGTGTKVTVL

SEQ ID NO: 17503 - protein, 108 aa, Homo sapiens
SYVLTQPPSVSVAPGKTARITCGGNNIGSKSVHWYQQKPGQAPVLVIYYDSDRPSGIPERFSGSNSGNTATLTISRVEAGDEADYYCQVWDSSSDPVVFGGGTKLTVL

SEQ ID NO: 17504 - protein, 96 aa, Homo sapiens
SYVLTQPPSVSVAPGKTARITCGGNNIGSKSVHWYQQKPGQAPVLVVYDDSDRPSGIPERFSGSNSGNTATLTISRVEAGDEADYYCQVWDSSSDH

SEQ ID NO: 17505 - protein, 108 aa, Homo sapiens
SYVLTQPPSVSVAPGKTARITCGGNNIGSKSVHWYQQKPGQAPVLVVYDDSDRPSGIPERFSGSNSGNTATLTISRVEAGDEADYYCQVWDSSSDHVVFGGGTKLTVL

SEQ ID NO: 17506 - protein, 96 aa, Homo sapiens
SYVLTQPPSVSVAPGQTARITCGGDNIGSKSVQWYQKKPGQAPVMVVYDNRDRPSGIPERFSGSNSGNTATLTISRVEAGDEADYYCQVWDRTSDH

SEQ ID NO: 17507 - protein, 108 aa, Homo sapiens
SYVLTQPPSVSVAPGQTARITCGGDNIGSKSVQWYQKKPGQAPVMVVYDNRDRPSGIPERFSGSNSGNTATLTISRVEAGDEADYYCQVWDRTSDHWVFGGGTKLTAL

SEQ ID NO: 17508 - protein, 96 aa, Homo sapiens
SYVLTQPPSVSVAPGQTARITCGGNNIGDKSVHWYQQRPGQAPVLVVFDDSDRPSRIPERFSGSNSGNTATLTISSVEAGDEADFYCQVWDRSSDH

SEQ ID NO: 17509 - protein, 108 aa, Homo sapiens
SYVLTQPPSVSVAPGQTARITCGGNNIGDKSVHWYQQRPGQAPVLVVFDDSDRPSRIPERFSGSNSGNTATLTISSVEAGDEADFYCQVWDRSSDHWVFGGGTKLTVL

SEQ ID NO: 17510 - protein, 109 aa, Homo sapiens
SYVLTQPPSVSVAPGQTARITCGGNNIGIKSVHWYQQKTGQAPVLVVYDDSVRPSGIPERFSGSNSGNTATERFSGSNSTNTATLTISRVEAGDEAEYYCQVWDSNSDH

SEQ ID NO: 17511 - protein, 122 aa, Homo sapiens
SYVLTQPPSVSVAPGQTARITCGGNNIGIKSVHWYQQKTGQAPVLVVYDDSVRPSGIPERFSGSNSGNTATERFSGSNSTNTATLTISRVEAGDEAEYYCQVWDSNSDHLVIFGGGTKLSVL

SEQ ID NO: 17512 - protein, 96 aa, Homo sapiens
SYVLTQPPSVSVAPGQTARITCGGNNIGTKIVHWYQQKPGQAPVLVVYDDSDRPSGIPERFSGSNSGNPATLTISRVEAGDEADYYCQVWDSSSDH

SEQ ID NO: 17513 - protein, 108 aa, Homo sapiens
SYVLTQPPSVSVAPGQTARITCGGNNIGTKIVHWYQQKPGQAPVLVVYDDSDRPSGIPERFSGSNSGNPATLTISRVEAGDEADYYCQVWDSSSDHWVFGGGTKLTVL

SEQ ID NO: 17514 - protein, 97 aa, Homo sapiens
SYVLTQPPSVSVAPGQTARITCGGNSIGSKSVHWYQQKAGQAPVLVVYEDRDRPSGIPERVSGSNSGNTATLTISRVEAGDEADYYCQVWDTSNEHP

SEQ ID NO: 17515 - protein, 109 aa, Homo sapiens
SYVLTQPPSVSVAPGQTARITCGGNSIGSKSVHWYQQKAGQAPVLVVYEDRDRPSGIPERVSGSNSGNTATLTISRVEAGDEADYYCQVWDTSNEHPLVFGGGTKLTVL

SEQ ID NO: 17516 - protein, 95 aa, Homo sapiens
SYVLTQPPSVSVAPGQTARMTCGADNIVSRNVHWYQQKAGRAPVVVVYDDSDRPSGVPERFSGSNSENTATLTISRVEAGDEADYYCQVWDTPSD

SEQ ID NO: 17517 - protein, 108 aa, Homo sapiens
SYVLTQPPSVSVAPGQTARMTCGADNIVSRNVHWYQQKAGRAPVVVVYDDSDRPSGVPERFSGSNSENTATLTISRVEAGDEADYYCQVWDTPSDQWVFGGGTKLTVL

SEQ ID NO: 17518 - protein, 96 aa, Homo sapiens
SYVLTQPPSVSVAPGQTARVTCGGNNLRSKSVHWYQQKPGQAPVLVAYDDTDRPSGIPDLFSGSKSGDTATLTINRVEAGFEADYYCQVWDSSTDH

SEQ ID NO: 17519 - protein, 108 aa, Homo sapiens
SYVLTQPPSVSVAPGQTARVTCGGNNLRSKSVHWYQQKPGQAPVLVAYDDTDRPSGIPDLFSGSKSGDTATLTINRVEAGFEADYYCQVWDSSTDHWVFGGGTKLTVV

SEQ ID NO: 17520 - protein, 96 aa, Homo sapiens
SYVLTQPPSVSVAPGQTASITCGGNNIGSESVHWYQQKPGQAPVLVVYDDSDRPSGIPERFSGSNSGNTATLSISRVEAGDEADYYCQVWDRSSDH

SEQ ID NO: 17521 - protein, 108 aa, Homo sapiens
SYVLTQPPSVSVAPGQTASITCGGNNIGSESVHWYQQKPGQAPVLVVYDDSDRPSGIPERFSGSNSGNTATLSISRVEAGDEADYYCQVWDRSSDHWVFGGGTKLTVL

SEQ ID NO: 17522 - protein, 96 aa, Homo sapiens
SYVLTQPPSVSVAPGQTASITCGGNNIGSKSVHWYQQKPGQAPVLVVYDDTDRPSGIPERFSGSNSGNTATLTISRVEAGDEADYYCQVWDRSSDH

SEQ ID NO: 17523 - protein, 108 aa, Homo sapiens
SYVLTQPPSVSVAPGQTASITCGGNNIGSKSVHWYQQKPGQAPVLVVYDDTDRPSGIPERFSGSNSGNTATLTISRVEAGDEADYYCQVWDRSSDHWVFGGGTKLTVL

SEQ ID NO: 17524 - protein, 96 aa, Homo sapiens
SYVLTQPPSVSVAPGQTASITCGGNYIASKSVHWYQQKPGLAPVLVVYDDRDRPSGIPERFSGSNSGNTATLTISRVEAGDEADYYCQVWHSSNDH

SEQ ID NO: 17525 - protein, 108 aa, Homo sapiens
SYVLTQPPSVSVAPGQTASITCGGNYIASKSVHWYQQKPGLAPVLVVYDDRDRPSGIPERFSGSNSGNTATLTISRVEAGDEADYYCQVWHSSNDHWVFGGGTKLTVL

SEQ ID NO: 17526 - protein, 96 aa, Homo sapiens
SYVLTQSPSVSVAPGETARITCGGEKIGRKSVNWYQQKPGQAPVLVIYDDRNRPSGIPERISGSVSENTAALSLSRVEAGDEADYYCQVWDTSTNH

SEQ ID NO: 17527 - protein, 108 aa, Homo sapiens
SYVLTQSPSVSVAPGETARITCGGEKIGRKSVNWYQQKPGQAPVLVIYDDRNRPSGIPERISGSVSENTAALSLSRVEAGDEADYYCQVWDTSTNHVIFGGGTKLTVL

SEQ ID NO: 17528 - protein, 5 aa, Homo sapiens
SYVMN

SEQ ID NO: 17529 - protein, 5 aa, Homo sapiens
SYVMT

SEQ ID NO: 17530 - protein, 5 aa, Homo sapiens
SYVMY

SEQ ID NO: 17531 - protein, 96 aa, Homo sapiens
SYVVTQPPSVSVAPGMTATISCGGYNIGSQSVHWYQQKPGLAPLLVLYDDRDRPSGIPERFSGSNSGNTATLTISRVEAGDEAAYYCQVRDSSGDH

SEQ ID NO: 17532 - protein, 108 aa, Homo sapiens
SYVVTQPPSVSVAPGMTATISCGGYNIGSQSVHWYQQKPGLAPLLVLYDDRDRPSGIPERFSGSNSGNTATLTISRVEAGDEAAYYCQVRDSSGDHRVFGGGTKLTVL

SEQ ID NO: 17533 - protein, 13 aa, Homo sapiens
SYVWGSGARYFDL

SEQ ID NO: 17534 - protein, 5 aa, Homo sapiens
SYWIA

SEQ ID NO: 17535 - protein, 5 aa, Homo sapiens
SYWIG

SEQ ID NO: 17536 - protein, 5 aa, Homo sapiens
SYWIS

SEQ ID NO: 17537 - protein, 5 aa, Homo sapiens
TNYWS

SEQ ID NO: 17538 - protein, 10 aa, Homo sapiens
TPFPFLWFDP

SEQ ID NO: 17539 - protein, 14 aa, Homo sapiens
TPLDYFESSGYHRS

SEQ ID NO: 17540 - protein, 9 aa, Homo sapiens
TQATQFPHT

SEQ ID NO: 17541 - protein, 7 aa, Homo sapiens
TQGPLDY

SEQ ID NO: 17542 - protein, 10 aa, Homo sapiens
TQIKHWRLFT

SEQ ID NO: 17543 - protein, 7 aa, Homo sapiens
TRGEGVA

SEQ ID NO: 17544 - protein, 7 aa, Homo sapiens
TRGVGVG

SEQ ID NO: 17545 - protein, 14 aa, Homo sapiens
TRIAAAGTAEYFQH

SEQ ID NO: 17546 - protein, 12 aa, Homo sapiens
TRIVGATLTFDY

SEQ ID NO: 17547 - protein, 5 aa, Homo sapiens
TRPIH

SEQ ID NO: 17548 - protein, 11 aa, Homo sapiens
TRQGIWGYFDY

SEQ ID NO: 17549 - protein, 7 aa, Homo sapiens
TRRVGVA

SEQ ID NO: 17550 - protein, 13 aa, Homo sapiens
TRSSGSIASNYVQ

SEQ ID NO: 17551 - protein, 12 aa, Homo sapiens
TRYYHLEGAFDN

SEQ ID NO: 17552 - protein, 7 aa, Homo sapiens
TSAVGVG

SEQ ID NO: 17553 - protein, 6 aa, Homo sapiens
TSAWWN

SEQ ID NO: 17554 - protein, 5 aa, Homo sapiens
TSGIS

SEQ ID NO: 17555 - protein, 7 aa, Homo sapiens
TSGMCVS

SEQ ID NO: 17556 - protein, 5 aa, Homo sapiens
TSGMH

SEQ ID NO: 17557 - protein, 7 aa, Homo sapiens
TSGVAVG

SEQ ID NO: 17558 - protein, 7 aa, Homo sapiens
TSGVGVG

SEQ ID NO: 17559 - protein, 9 aa, Homo sapiens
TSGWSNLDY

SEQ ID NO: 17560 - protein, 5 aa, Homo sapiens
TSIIS

SEQ ID NO: 17561 - protein, 5 aa, Homo sapiens
TSILS

SEQ ID NO: 17562 - protein, 7 aa, Homo sapiens
TSNYYWG

SEQ ID NO: 17563 - protein, 16 aa, Homo sapiens
TSPPRAVAGRRDAFDI

SEQ ID NO: 17564 - protein, 11 aa, Homo sapiens
TSPQQQLEFDY

SEQ ID NO: 17565 - protein, 15 aa, Homo sapiens
TSRVDYSDVYDAFHI

SEQ ID NO: 17566 - protein, 16 aa, Homo sapiens
TSSESLVHSNGNTYLS

SEQ ID NO: 17567 - protein, 20 aa, Homo sapiens
TSSHANSSSWEAYYSYVMDV

SEQ ID NO: 17568 - protein, 5 aa, Homo sapiens
TSSMN

SEQ ID NO: 17569 - protein, 7 aa, Homo sapiens
TSSYYWG

SEQ ID NO: 17570 - protein, 5 aa, Homo sapiens
TSTMN

SEQ ID NO: 17571 - protein, 11 aa, Homo sapiens
TSWDDYLKSYV

SEQ ID NO: 17572 - protein, 10 aa, Homo sapiens
TSYAGNNDQK

SEQ ID NO: 17573 - protein, 10 aa, Homo sapiens
TSYAGSNTLI

SEQ ID NO: 17574 - protein, 10 aa, Homo sapiens
TSYGGSNNWV

SEQ ID NO: 17575 - protein, 11 aa, Homo sapiens
TSYSSSGTLYV

SEQ ID NO: 17576 - protein, 5 aa, Homo sapiens
TSYWT

SEQ ID NO: 17577 - protein, 7 aa, Homo sapiens
TTDNLQA

SEQ ID NO: 17578 - protein, 7 aa, Homo sapiens
TTGFFWG

SEQ ID NO: 17579 - protein, 7 aa, Homo sapiens
TTGVGVG

SEQ ID NO: 17580 - protein, 7 aa, Homo sapiens
TTGVGVS

SEQ ID NO: 17581 - protein, 10 aa, Homo sapiens
TTIGDYEVDY

SEQ ID NO: 17582 - protein, 17 aa, Homo sapiens
TTRNNRGRTSYADSVKG

SEQ ID NO: 17583 - protein, 15 aa, Homo sapiens
TTRYSGYFFHQNFDS

SEQ ID NO: 17584 - protein, 13 aa, Homo sapiens
TTSGRYNAYYFDY

SEQ ID NO: 17585 - protein, 13 aa, Homo sapiens
TTSGRYYAYYFDY

SEQ ID NO: 17586 - protein, 7 aa, Homo sapiens
TTSQRPS

SEQ ID NO: 17587 - protein, 7 aa, Homo sapiens
TTSTLQS

SEQ ID NO: 17588 - protein, 15 aa, Homo sapiens
TTTYISGSYLSPPEY

SEQ ID NO: 17589 - protein, 13 aa, Homo sapiens
TVEEGPYYYYMDV

SEQ ID NO: 17590 - protein, 16 aa, Homo sapiens
TVGAAGDTYYADSVEG

SEQ ID NO: 17591 - protein, 94 aa, Homo sapiens
TVLTQSPGTLSLSPGERATLSCRASQSVTSNYLVWYQQKTGQAPRVLIYGASTRATGIPDRFSGSGSGTDFTLTITRLEPEDFAVYYCQQYGNS

SEQ ID NO: 17592 - protein, 107 aa, Homo sapiens
TVLTQSPGTLSLSPGERATLSCRASQSVTSNYLVWYQQKTGQAPRVLIYGASTRATGIPDRFSGSGSGTDFTLTITRLEPEDFAVYYCQQYGNSLYTFGQGTKLEIK

SEQ ID NO: 17593 - protein, 7 aa, Homo sapiens
TVSNRDS

SEQ ID NO: 17594 - protein, 17 aa, Homo sapiens
TVSSSGGSTYYADSVKG

SEQ ID NO: 17595 - protein, 16 aa, Homo sapiens
TVSYDLLTGYSYYFDY

SEQ ID NO: 17596 - protein, 16 aa, Homo sapiens
TVTMVRGGEPYYAFDI

SEQ ID NO: 17597 - protein, 16 aa, Homo sapiens
TVYAIRDYYYYYGMDV

SEQ ID NO: 17598 - protein, 16 aa, Homo sapiens
TVYYTGSTSYNPSLKS

SEQ ID NO: 17599 - protein, 5 aa, Homo sapiens
TYAIH

SEQ ID NO: 17600 - protein, 5 aa, Homo sapiens
TYAIS

SEQ ID NO: 17601 - protein, 5 aa, Homo sapiens
TYAIT

SEQ ID NO: 17602 - protein, 5 aa, Homo sapiens
TYALH

SEQ ID NO: 17603 - protein, 5 aa, Homo sapiens
TYALN

SEQ ID NO: 17604 - protein, 5 aa, Homo sapiens
TYAMA

SEQ ID NO: 17605 - protein, 5 aa, Homo sapiens
TYAMH

SEQ ID NO: 17606 - protein, 5 aa, Homo sapiens
TYAMN

SEQ ID NO: 17607 - protein, 5 aa, Homo sapiens
TYAMQ

SEQ ID NO: 17608 - protein, 5 aa, Homo sapiens
TYAMS

SEQ ID NO: 17609 - protein, 5 aa, Homo sapiens
TYAMT

SEQ ID NO: 17610 - protein, 5 aa, Homo sapiens
TYDIN

SEQ ID NO: 17611 - protein, 5 aa, Homo sapiens
TYDLS

SEQ ID NO: 17612 - protein, 5 aa, Homo sapiens
TYDMS

SEQ ID NO: 17613 - protein, 5 aa, Homo sapiens
TYDVN

SEQ ID NO: 17614 - protein, 5 aa, Homo sapiens
TYEMN

SEQ ID NO: 17615 - protein, 5 aa, Homo sapiens
TYFMT

SEQ ID NO: 17616 - protein, 5 aa, Homo sapiens
TYFWS

SEQ ID NO: 17617 - protein, 5 aa, Homo sapiens
TYGIN

SEQ ID NO: 17618 - protein, 5 aa, Homo sapiens
TYGIS

SEQ ID NO: 17619 - protein, 5 aa, Homo sapiens
TYGIT

SEQ ID NO: 17620 - protein, 5 aa, Homo sapiens
TYGLH

SEQ ID NO: 17621 - protein, 5 aa, Homo sapiens
TYGMH

SEQ ID NO: 17622 - protein, 5 aa, Homo sapiens
TYGMM

SEQ ID NO: 17623 - protein, 5 aa, Homo sapiens
TYGMN

SEQ ID NO: 17624 - protein, 5 aa, Homo sapiens
TYGMR

SEQ ID NO: 17625 - protein, 5 aa, Homo sapiens
TYGMY

SEQ ID NO: 17626 - protein, 5 aa, Homo sapiens
TYHWN

SEQ ID NO: 17627 - protein, 5 aa, Homo sapiens
TYLMH

SEQ ID NO: 17628 - protein, 5 aa, Homo sapiens
TYNMN

SEQ ID NO: 17629 - protein, 13 aa, Homo sapiens
TYNYDSSGYYNYY

SEQ ID NO: 17630 - protein, 5 aa, Homo sapiens
TYSFH

SEQ ID NO: 17631 - protein, 5 aa, Homo sapiens
TYSLH

SEQ ID NO: 17632 - protein, 5 aa, Homo sapiens
TYSMA

SEQ ID NO: 17633 - protein, 5 aa, Homo sapiens
TYSMH

SEQ ID NO: 17634 - protein, 5 aa, Homo sapiens
TYSMN

SEQ ID NO: 17635 - protein, 5 aa, Homo sapiens
TYTFS

SEQ ID NO: 17636 - protein, 5 aa, Homo sapiens
TYTIS

SEQ ID NO: 17637 - protein, 5 aa, Homo sapiens
TYTMH

SEQ ID NO: 17638 - protein, 5 aa, Homo sapiens
TYTVS

SEQ ID NO: 17639 - protein, 5 aa, Homo sapiens
TYVMS

SEQ ID NO: 17640 - protein, 5 aa, Homo sapiens
TYVMY

SEQ ID NO: 17641 - protein, 5 aa, Homo sapiens
TYVVN

SEQ ID NO: 17642 - protein, 5 aa, Homo sapiens
TYWIA

SEQ ID NO: 17643 - protein, 5 aa, Homo sapiens
TYWIG

SEQ ID NO: 17644 - protein, 5 aa, Homo sapiens
TYWIV

SEQ ID NO: 17645 - protein, 5 aa, Homo sapiens
TYWMA

SEQ ID NO: 17646 - protein, 5 aa, Homo sapiens
TYWMH

SEQ ID NO: 17647 - protein, 5 aa, Homo sapiens
TYWMN

SEQ ID NO: 17648 - protein, 5 aa, Homo sapiens
TYWMS

SEQ ID NO: 17649 - protein, 5 aa, Homo sapiens
TYWMT

SEQ ID NO: 17650 - protein, 5 aa, Homo sapiens
TYYIH

SEQ ID NO: 17651 - protein, 5 aa, Homo sapiens
TYYMS

SEQ ID NO: 17652 - protein, 12 aa, Homo sapiens
TYYSSSSGYLKH

SEQ ID NO: 17653 - protein, 12 aa, Homo sapiens
TYYSTTSGYLHH

SEQ ID NO: 17654 - protein, 5 aa, Homo sapiens
TYYVH

SEQ ID NO: 17655 - protein, 5 aa, Homo sapiens
TYYWS

SEQ ID NO: 17656 - protein, 5 aa, Homo sapiens
TYYWT

SEQ ID NO: 17657 - protein, 15 aa, Homo sapiens
TYYYGSGSYSYPFDY

SEQ ID NO: 17658 - protein, 7 aa, Homo sapiens
VAGIQGI

SEQ ID NO: 17659 - protein, 17 aa, Homo sapiens
VALPDDDGNSRYRHIGF

SEQ ID NO: 17660 - protein, 15 aa, Homo sapiens
VAPDTTMVRGGFFDF

SEQ ID NO: 17661 - protein, 11 aa, Homo sapiens
VARATTYYFDY

SEQ ID NO: 17662 - protein, 15 aa, Homo sapiens
VASDNYYDVFSWFDP

SEQ ID NO: 17663 - protein, 7 aa, Homo sapiens
VASRLQS

SEQ ID NO: 17664 - protein, 7 aa, Homo sapiens
VASSLQS

SEQ ID NO: 17665 - protein, 7 aa, Homo sapiens
VASSRAS

SEQ ID NO: 17666 - protein, 7 aa, Homo sapiens
VASTLHT

SEQ ID NO: 17667 - protein, 11 aa, Homo sapiens
VAWDDNLNGWV

SEQ ID NO: 17668 - protein, 11 aa, Homo sapiens
VAWDDRLKAWV

SEQ ID NO: 17669 - protein, 11 aa, Homo sapiens
VAWDDRLNVWV

SEQ ID NO: 17670 - protein, 11 aa, Homo sapiens
VAWDDSLEVWV

SEQ ID NO: 17671 - protein, 11 aa, Homo sapiens
VAWDDSLKAWV

SEQ ID NO: 17672 - protein, 11 aa, Homo sapiens
VAWDDSLRIWV

SEQ ID NO: 17673 - protein, 11 aa, Homo sapiens
VAWDNSLSGWV

SEQ ID NO: 17674 - protein, 12 aa, Homo sapiens
VDANWNHDAFDI

SEQ ID NO: 17675 - protein, 11 aa, Homo sapiens
VDGAYGGAFDI

SEQ ID NO: 17676 - protein, 15 aa, Homo sapiens
VDLRYDSSGYRPLDF

SEQ ID NO: 17677 - protein, 17 aa, Homo sapiens
VDRYCAKSSCFGAWFEP

SEQ ID NO: 17678 - protein, 12 aa, Homo sapiens
VDSGGIVESKGE

SEQ ID NO: 17679 - protein, 12 aa, Homo sapiens
VDVNWNHDAFDI

SEQ ID NO: 17680 - protein, 5 aa, Homo sapiens
VDWMS

SEQ ID NO: 17681 - protein, 9 aa, Homo sapiens
VDYLAGIPY

SEQ ID NO: 17682 - protein, 14 aa, Homo sapiens
VEGYCTNDNCYFRN

SEQ ID NO: 17683 - protein, 97 aa, Homo sapiens
VELVESGGGLVQPGGSLRLSCAASGFTFNRYWMIWVRQFPGKGLEWLANIKQDGSETHYLDSVRGRFTISRDNAQHSLYLQMNSLRVEDTAVYYCAR

SEQ ID NO: 17684 - protein, 125 aa, Homo sapiens
VELVESGGGLVQPGGSLRLSCAASGFTFNRYWMIWVRQFPGKGLEWLANIKQDGSETHYLDSVRGRFTISRDNAQHSLYLQMNSLRVEDTAVYYCARVEPDDGSGNSFYRFYDLWGQGSLVTVSS

SEQ ID NO: 17685 - protein, 96 aa, Homo sapiens
VELVESGGGLVQPGGSLTLSCAASEFTFSSYEMNWVRQAPGKGLEWVSYISSSGDKIYYADSVKGRFTISRDNAKKSLYLQMNSLRGEDTAVYYCA

SEQ ID NO: 17686 - protein, 121 aa, Homo sapiens
VELVESGGGLVQPGGSLTLSCAASEFTFSSYEMNWVRQAPGKGLEWVSYISSSGDKIYYADSVKGRFTISRDNAKKSLYLQMNSLRGEDTAVYYCARVPWYSESRFDVDPWGQGTLVTVSS

SEQ ID NO: 17687 - protein, 17 aa, Homo sapiens
VEPDDGSGNSFYRFYDL

SEQ ID NO: 17688 - protein, 9 aa, Homo sapiens
VEQSSGPDY

SEQ ID NO: 17689 - protein, 13 aa, Homo sapiens
VESFYSSGWSFDN

SEQ ID NO: 17690 - protein, 94 aa, Homo sapiens
VESGGGLVQPGGSRRLSCEASGFTFSNFVMSWVRQAPGKGLEWVSSISGTSLSAYYIDSVKGRFTVSRDNSKNTLYLQMKSLRVEDTAIYYCAK

SEQ ID NO: 17691 - protein, 118 aa, Homo sapiens
VESGGGLVQPGGSRRLSCEASGFTFSNFVMSWVRQAPGKGLEWVSSISGTSLSAYYIDSVKGRFTVSRDNSKNTLYLQMKSLRVEDTAIYYCAKDFTRRPIETAFDVWGQGTMVTVSP

SEQ ID NO: 17692 - protein, 94 aa, Homo sapiens
VESGGGVVRPGGSLRLSCAASGFTLDDYGMTWVRQAPGKGLEWVSGIFWNGGIRGYADSVKGRFTISRDNAENSLYLQMNSLRAEDTALYYCAR

SEQ ID NO: 17693 - protein, 118 aa, Homo sapiens
VESGGGVVRPGGSLRLSCAASGFTLDDYGMTWVRQAPGKGLEWVSGIFWNGGIRGYADSVKGRFTISRDNAENSLYLQMNSLRAEDTALYYCARGEWGSSSWYAFDYWGQGTLVTVSS

SEQ ID NO: 17694 - protein, 15 aa, Homo sapiens
VESSSAGGRPWYFDL

SEQ ID NO: 17695 - protein, 9 aa, Homo sapiens
VEYNYAFDS

SEQ ID NO: 17696 - protein, 15 aa, Homo sapiens
VFDDSSGYYQYYFDY

SEQ ID NO: 17697 - protein, 15 aa, Homo sapiens
VFKEGIVATINAFDI

SEQ ID NO: 17698 - protein, 8 aa, Homo sapiens
VFYGGVTY

SEQ ID NO: 17699 - protein, 19 aa, Homo sapiens
VGAGGVGELSWVPYYGMDV

SEQ ID NO: 17700 - protein, 14 aa, Homo sapiens
VGGAVGPTLGRNDY

SEQ ID NO: 17701 - protein, 15 aa, Homo sapiens
VGGNYFGYFYSYLDV

SEQ ID NO: 17702 - protein, 14 aa, Homo sapiens
VGGVLGASLGRNDY

SEQ ID NO: 17703 - protein, 14 aa, Homo sapiens
VGGVLGATLGHNDY

SEQ ID NO: 17704 - protein, 14 aa, Homo sapiens
VGGVLGATLGRNDN

SEQ ID NO: 17705 - protein, 14 aa, Homo sapiens
VGGVLGATLGRNDY

SEQ ID NO: 17706 - protein, 14 aa, Homo sapiens
VGGVVGPTLGRSDY

SEQ ID NO: 17707 - protein, 12 aa, Homo sapiens
VGGYSYAGAFDI

SEQ ID NO: 17708 - protein, 15 aa, Homo sapiens
VGISGSYQTVDAFDI

SEQ ID NO: 17709 - protein, 18 aa, Homo sapiens
VGKVGDFWSGYHPNGMDV

SEQ ID NO: 17710 - protein, 15 aa, Homo sapiens
VGMVRDTYYYYGMDV

SEQ ID NO: 17711 - protein, 15 aa, Homo sapiens
VGPGYQLLPNDWFDP

SEQ ID NO: 17712 - protein, 20 aa, Homo sapiens
VGPTEYQLLYTTRYYYYMDV

SEQ ID NO: 17713 - protein, 16 aa, Homo sapiens
VGRRGGGGWRAGHFDN

SEQ ID NO: 17714 - protein, 14 aa, Homo sapiens
VGRYSDWYRRVQDY

SEQ ID NO: 17715 - protein, 11 aa, Homo sapiens
VGSDSDEQQGS

SEQ ID NO: 17716 - protein, 14 aa, Homo sapiens
VGSHDSTAYRSFHN

SEQ ID NO: 17717 - protein, 7 aa, Homo sapiens
VGSSRAS

SEQ ID NO: 17718 - protein, 12 aa, Homo sapiens
VGTGGIMGSKGD

SEQ ID NO: 17719 - protein, 12 aa, Homo sapiens
VGTGGIVGFKGD

SEQ ID NO: 17720 - protein, 12 aa, Homo sapiens
VGTGGIVGSKGD

SEQ ID NO: 17721 - protein, 12 aa, Homo sapiens
VGTGGNVGAKGE

SEQ ID NO: 17722 - protein, 7 aa, Homo sapiens
VGTVTRF

SEQ ID NO: 17723 - protein, 13 aa, Homo sapiens
VGWVAARRAPIDY

SEQ ID NO: 17724 - protein, 12 aa, Homo sapiens
VGYSGFINAFDV

SEQ ID NO: 17725 - protein, 16 aa, Homo sapiens
VHCSSTSCYYYYYMDV

SEQ ID NO: 17726 - protein, 97 aa, Homo sapiens
VHLVESGGGLVQPGGSLRLSCAASGLTFSNYEMNWVRQAPGKGLEWIAQISFSDNEIYYRDSVKGRFTISRDNAKNSLFLQMDSLGAEDTAVYYCAR

SEQ ID NO: 17727 - protein, 126 aa, Homo sapiens
VHLVESGGGLVQPGGSLRLSCAASGLTFSNYEMNWVRQAPGKGLEWIAQISFSDNEIYYRDSVKGRFTISRDNAKNSLFLQMDSLGAEDTAVYYCARGGPYCGSDCSSNYNYFDYWGQGTLVTVSS

SEQ ID NO: 17728 - protein, 14 aa, Homo sapiens
VHTIFGVVRGYFDY

SEQ ID NO: 17729 - protein, 17 aa, Homo sapiens
VIAGSGDSTSYAGSVKG

SEQ ID NO: 17730 - protein, 17 aa, Homo sapiens
VIAGSGDSTSYGDSVKG

SEQ ID NO: 17731 - protein, 17 aa, Homo sapiens
VIDAEDGETIYAENVRG

SEQ ID NO: 17732 - protein, 10 aa, Homo sapiens
VIGGRYHADN

SEQ ID NO: 17733 - protein, 10 aa, Homo sapiens
VIGGRYHADS

SEQ ID NO: 17734 - protein, 10 aa, Homo sapiens
VIGGRYHADY

SEQ ID NO: 17735 - protein, 10 aa, Homo sapiens
VIGLYGYFDY

SEQ ID NO: 17736 - protein, 17 aa, Homo sapiens
VIHPHNSDTTYSPSFQG

SEQ ID NO: 17737 - protein, 16 aa, Homo sapiens
VIHSGGNTYYADSLKG

SEQ ID NO: 17738 - protein, 16 aa, Homo sapiens
VIHTSGVTNYADSIKG

SEQ ID NO: 17739 - protein, 17 aa, Homo sapiens
VIIGMFGTTKYAQKFQG

SEQ ID NO: 17740 - protein, 17 aa, Homo sapiens
VIKPSGDSTTDSQRFQG

SEQ ID NO: 17741 - protein, 17 aa, Homo sapiens
VILYDGGNKYYGDCAKG

SEQ ID NO: 17742 - protein, 17 aa, Homo sapiens
VILYDGNSKYYADSVKG

SEQ ID NO: 17743 - protein, 17 aa, Homo sapiens
VINPSGGATDYAQKFRG

SEQ ID NO: 17744 - protein, 17 aa, Homo sapiens
VINPSGGGTNYAQKFQG

SEQ ID NO: 17745 - protein, 17 aa, Homo sapiens
VIPYDGSNRYYADSVKG

SEQ ID NO: 17746 - protein, 17 aa, Homo sapiens
VIRASGESRDYGDSVKG

SEQ ID NO: 17747 - protein, 17 aa, Homo sapiens
VIRYDGTNEKYADSVRG

SEQ ID NO: 17748 - protein, 17 aa, Homo sapiens
VISDDGGDKYYSDSVKG

SEQ ID NO: 17749 - protein, 17 aa, Homo sapiens
VISDDGGNQYYADSVKG

SEQ ID NO: 17750 - protein, 17 aa, Homo sapiens
VISDDGNNQYYADSVTG

SEQ ID NO: 17751 - protein, 17 aa, Homo sapiens
VISDDGSNRHYADSVEG

SEQ ID NO: 17752 - protein, 17 aa, Homo sapiens
VISDSGDKTYYADSVKG

SEQ ID NO: 17753 - protein, 17 aa, Homo sapiens
VISFDVTNKYYADSVKG

SEQ ID NO: 17754 - protein, 17 aa, Homo sapiens
VISGSGGSRYYADSVKG

SEQ ID NO: 17755 - protein, 17 aa, Homo sapiens
VISGSGLSTYYADSVKG

SEQ ID NO: 17756 - protein, 17 aa, Homo sapiens
VISGTGISTYYADSVKG

SEQ ID NO: 17757 - protein, 17 aa, Homo sapiens
VISHDGNNKYYADYVKG

SEQ ID NO: 17758 - protein, 17 aa, Homo sapiens
VISKDGTKKVYADSVKG

SEQ ID NO: 17759 - protein, 17 aa, Homo sapiens
VISKDGTNKYYADSVKG

SEQ ID NO: 17760 - protein, 17 aa, Homo sapiens
VISNDGGDKYYADSVKG

SEQ ID NO: 17761 - protein, 17 aa, Homo sapiens
VISNEGTNKYYADSVKG

SEQ ID NO: 17762 - protein, 17 aa, Homo sapiens
VISNTETNKYYVDSVKG

SEQ ID NO: 17763 - protein, 17 aa, Homo sapiens
VISQDGSNKQYADSVKG

SEQ ID NO: 17764 - protein, 17 aa, Homo sapiens
VISRYGTNKYFADSVKG

SEQ ID NO: 17765 - protein, 17 aa, Homo sapiens
VISSDGSVQYYGDSGKG

SEQ ID NO: 17766 - protein, 18 aa, Homo sapiens
VISYDDGSNKYYTDSVKG

SEQ ID NO: 17767 - protein, 17 aa, Homo sapiens
VISYDENNKYYAGSVKG

SEQ ID NO: 17768 - protein, 17 aa, Homo sapiens
VISYDGGMRYYADSLQG

SEQ ID NO: 17769 - protein, 17 aa, Homo sapiens
VISYDGIKKYYADSVKG

SEQ ID NO: 17770 - protein, 17 aa, Homo sapiens
VISYDGNNKYYPASVKG

SEQ ID NO: 17771 - protein, 17 aa, Homo sapiens
VISYDGNNRYYAESAKG

SEQ ID NO: 17772 - protein, 17 aa, Homo sapiens
VISYDGSHKYYADSVKG

SEQ ID NO: 17773 - protein, 17 aa, Homo sapiens
VISYDGSKKFYADFVKG

SEQ ID NO: 17774 - protein, 17 aa, Homo sapiens
VISYDGSKKYYADSVKG

SEQ ID NO: 17775 - protein, 17 aa, Homo sapiens
VISYDGSNEYYADSVKG

SEQ ID NO: 17776 - protein, 17 aa, Homo sapiens
VISYDGSNGYYADSVKG

SEQ ID NO: 17777 - protein, 17 aa, Homo sapiens
VISYDGSNKYYADFVKG

SEQ ID NO: 17778 - protein, 17 aa, Homo sapiens
VISYDGSNKYYADSVKG

SEQ ID NO: 17779 - protein, 17 aa, Homo sapiens
VISYDGSNKYYADSVRG

SEQ ID NO: 17780 - protein, 17 aa, Homo sapiens
VISYDGTNKYYAESVKG

SEQ ID NO: 17781 - protein, 15 aa, Homo sapiens
VITGTSGAYYQHMDV

SEQ ID NO: 17782 - protein, 17 aa, Homo sapiens
VIVYDGTNEFYADSVRG

SEQ ID NO: 17783 - protein, 17 aa, Homo sapiens
VIWADGNTKYYKDSVKG

SEQ ID NO: 17784 - protein, 17 aa, Homo sapiens
VIWFDGSGKYYADSVKG

SEQ ID NO: 17785 - protein, 17 aa, Homo sapiens
VIWFDGTNEHYVDSVKG

SEQ ID NO: 17786 - protein, 17 aa, Homo sapiens
VIWHDGSNDFYADSVKG

SEQ ID NO: 17787 - protein, 17 aa, Homo sapiens
VIWHDGSNEFYADSVKG

SEQ ID NO: 17788 - protein, 9 aa, Homo sapiens
VIWHKNAYV

SEQ ID NO: 17789 - protein, 95 aa, Homo sapiens
VIWMTQSPSLLSASTGDRVTISCRMSQGISSYLAWYQQKPGKAPELLIYAASTLQSGVPSRFSGSGSGTDFTLTISCLQSEDFATYYCQQYYSFP

SEQ ID NO: 17790 - protein, 107 aa, Homo sapiens
VIWMTQSPSLLSASTGDRVTISCRMSQGISSYLAWYQQKPGKAPELLIYAASTLQSGVPSRFSGSGSGTDFTLTISCLQSEDFATYYCQQYYSFPLTFGGGTKVEIK

SEQ ID NO: 17791 - protein, 107 aa, Homo sapiens
VIWMTQSPSLLSASTGDRVTISCRMSQGISSYLAWYQQKPGKAPELLIYAASTLQSGVPSRFSGSGSGTDFTLTISCLQSEDFATYYCQQYYSFPLTFGQGTKVEIK

SEQ ID NO: 17792 - protein, 17 aa, Homo sapiens
VIWNDGSNKYYADSVKG

SEQ ID NO: 17793 - protein, 17 aa, Homo sapiens
VIWNDGSNKYYRDSVKG

SEQ ID NO: 17794 - protein, 17 aa, Homo sapiens
VIWPGDSDTRYNRSFEG

SEQ ID NO: 17795 - protein, 17 aa, Homo sapiens
VIWPGDSDTRYSPSFEG

SEQ ID NO: 17796 - protein, 17 aa, Homo sapiens
VIWPGDSDTRYSPSFQG

SEQ ID NO: 17797 - protein, 17 aa, Homo sapiens
VIWSDGSDKYYADSVKG

SEQ ID NO: 17798 - protein, 17 aa, Homo sapiens
VIWSDGSNKFYADSVQG

SEQ ID NO: 17799 - protein, 17 aa, Homo sapiens
VIWSDGTTKYYADSVKG

SEQ ID NO: 17800 - protein, 17 aa, Homo sapiens
VIWSNGINKYYADSVKG

SEQ ID NO: 17801 - protein, 17 aa, Homo sapiens
VIWYDGNTKYYADSVKG

SEQ ID NO: 17802 - protein, 17 aa, Homo sapiens
VIWYDGRNKYYADSVKG

SEQ ID NO: 17803 - protein, 17 aa, Homo sapiens
VIWYDGSDKNYADSVKG

SEQ ID NO: 17804 - protein, 17 aa, Homo sapiens
VIWYDGSDKWYAGSVKG

SEQ ID NO: 17805 - protein, 17 aa, Homo sapiens
VIWYDGSNEDYADAVKG

SEQ ID NO: 17806 - protein, 17 aa, Homo sapiens
VIWYDGSNKDYADSVKG

SEQ ID NO: 17807 - protein, 17 aa, Homo sapiens
VIWYDGSNKDYAESVKG

SEQ ID NO: 17808 - protein, 17 aa, Homo sapiens
VIWYDGSNKKNADSVKG

SEQ ID NO: 17809 - protein, 17 aa, Homo sapiens
VIWYDGSNKYYADSVKG

SEQ ID NO: 17810 - protein, 17 aa, Homo sapiens
VIWYDGSNKYYTDSVKG

SEQ ID NO: 17811 - protein, 17 aa, Homo sapiens
VIWYDGSNNYHADSVKG

SEQ ID NO: 17812 - protein, 17 aa, Homo sapiens
VIWYDGTNKYYADSVKG

SEQ ID NO: 17813 - protein, 17 aa, Homo sapiens
VIYPGDSDIRYSQSFQG

SEQ ID NO: 17814 - protein, 17 aa, Homo sapiens
VIYPGDSDTKYSPSFQG

SEQ ID NO: 17815 - protein, 17 aa, Homo sapiens
VIYPGDSDTRYSPSFQG

SEQ ID NO: 17816 - protein, 17 aa, Homo sapiens
VIYPGDSDTRYTPSFQG

SEQ ID NO: 17817 - protein, 17 aa, Homo sapiens
VIYPGDSDTRYTSSFEG

SEQ ID NO: 17818 - protein, 17 aa, Homo sapiens
VIYPGDSETRYSPSFEG

SEQ ID NO: 17819 - protein, 16 aa, Homo sapiens
VIYPSGAADYSSSVRG

SEQ ID NO: 17820 - protein, 16 aa, Homo sapiens
VIYRGGTTYYADSVKG

SEQ ID NO: 17821 - protein, 16 aa, Homo sapiens
VIYSGDITYYSNSVRG

SEQ ID NO: 17822 - protein, 16 aa, Homo sapiens
VIYSGDSTYYADSVKG

SEQ ID NO: 17823 - protein, 16 aa, Homo sapiens
VIYSGGSTYYADSVKG

SEQ ID NO: 17824 - protein, 16 aa, Homo sapiens
VIYSGSGTYYADSVKG

SEQ ID NO: 17825 - protein, 16 aa, Homo sapiens
VIYSGSRTFYAASVKG

SEQ ID NO: 17826 - protein, 16 aa, Homo sapiens
VIYWDDDKRYSPSLEN

SEQ ID NO: 17827 - protein, 16 aa, Homo sapiens
VIYWDDDKRYSPSLKS

SEQ ID NO: 17828 - protein, 15 aa, Homo sapiens
VKEFHGLASHYILDS

SEQ ID NO: 17829 - protein, 15 aa, Homo sapiens
VKEFYGSASHYILES

SEQ ID NO: 17830 - protein, 15 aa, Homo sapiens
VKERHGWASHYILDS

SEQ ID NO: 17831 - protein, 15 aa, Homo sapiens
VKLYDRKDYYRHFDR

SEQ ID NO: 17832 - protein, 20 aa, Homo sapiens
VKRFYDSLTGYSEVGEYFQY

SEQ ID NO: 17833 - protein, 18 aa, Homo sapiens
VKVSYDVLGAGPLVLFDN

SEQ ID NO: 17834 - protein, 19 aa, Homo sapiens
VLAGRRNLNGSGSYRGFDI

SEQ ID NO: 17835 - protein, 12 aa, Homo sapiens
VLFSHYYYGMDV

SEQ ID NO: 17836 - protein, 14 aa, Homo sapiens
VLGGYVYYFYGMDV

SEQ ID NO: 17837 - protein, 5 aa, Homo sapiens
SYWMA

SEQ ID NO: 17838 - protein, 5 aa, Homo sapiens
SYWMH

SEQ ID NO: 17839 - protein, 5 aa, Homo sapiens
SYWMI

SEQ ID NO: 17840 - protein, 5 aa, Homo sapiens
SYWMK

SEQ ID NO: 17841 - protein, 5 aa, Homo sapiens
SYWMN

SEQ ID NO: 17842 - protein, 5 aa, Homo sapiens
SYWMS

SEQ ID NO: 17843 - protein, 5 aa, Homo sapiens
SYWMT

SEQ ID NO: 17844 - protein, 5 aa, Homo sapiens
SYWVG

SEQ ID NO: 17845 - protein, 5 aa, Homo sapiens
SYYFQ

SEQ ID NO: 17846 - protein, 13 aa, Homo sapiens
SYYGGNSDAQIDY

SEQ ID NO: 17847 - protein, 5 aa, Homo sapiens
SYYIN

SEQ ID NO: 17848 - protein, 5 aa, Homo sapiens
SYYMH

SEQ ID NO: 17849 - protein, 5 aa, Homo sapiens
SYYMS

SEQ ID NO: 17850 - protein, 5 aa, Homo sapiens
SYYMT

SEQ ID NO: 17851 - protein, 9 aa, Homo sapiens
SYYTYYYDY

SEQ ID NO: 17852 - protein, 5 aa, Homo sapiens
SYYVH

SEQ ID NO: 17853 - protein, 5 aa, Homo sapiens
SYYWG

SEQ ID NO: 17854 - protein, 5 aa, Homo sapiens
SYYWH

SEQ ID NO: 17855 - protein, 5 aa, Homo sapiens
SYYWN

SEQ ID NO: 17856 - protein, 5 aa, Homo sapiens
SYYWS

SEQ ID NO: 17857 - protein, 5 aa, Homo sapiens
SYYWT

SEQ ID NO: 17858 - protein, 13 aa, Homo sapiens
TAEMITTISGFDL

SEQ ID NO: 17859 - protein, 14 aa, Homo sapiens
TAGDSSTFYRAFDI

SEQ ID NO: 17860 - protein, 12 aa, Homo sapiens
TAGGSGTYWVHS

SEQ ID NO: 17861 - protein, 9 aa, Homo sapiens
TAHEDAFDI

SEQ ID NO: 17862 - protein, 7 aa, Homo sapiens
TASNFQS

SEQ ID NO: 17863 - protein, 7 aa, Homo sapiens
TASNLHS

SEQ ID NO: 17864 - protein, 7 aa, Homo sapiens
TASSLES

SEQ ID NO: 17865 - protein, 7 aa, Homo sapiens
TASSLQS

SEQ ID NO: 17866 - protein, 7 aa, Homo sapiens
TASTLES

SEQ ID NO: 17867 - protein, 7 aa, Homo sapiens
TASTLQR

SEQ ID NO: 17868 - protein, 7 aa, Homo sapiens
TASTRAT

SEQ ID NO: 17869 - protein, 5 aa, Homo sapiens
TAWMS

SEQ ID NO: 17870 - protein, 6 aa, Homo sapiens
TAYYWA

SEQ ID NO: 17871 - protein, 13 aa, Homo sapiens
TCSSGSIASNYVQ

SEQ ID NO: 17872 - protein, 5 aa, Homo sapiens
TDAIS

SEQ ID NO: 17873 - protein, 11 aa, Homo sapiens
TDSSSLNWFDP

SEQ ID NO: 17874 - protein, 14 aa, Homo sapiens
TDWYINNWGSAFDY

SEQ ID NO: 17875 - protein, 14 aa, Homo sapiens
TETSSDIGAYKYVS

SEQ ID NO: 17876 - protein, 14 aa, Homo sapiens
TETSSDVGGRNFVS

SEQ ID NO: 17877 - protein, 14 aa, Homo sapiens
TETSSDVGGRNYVS

SEQ ID NO: 17878 - protein, 14 aa, Homo sapiens
TETSSDVGGRYYVS

SEQ ID NO: 17879 - protein, 13 aa, Homo sapiens
TEWELKRHWYFDL

SEQ ID NO: 17880 - protein, 5 aa, Homo sapiens
TFAIH

SEQ ID NO: 17881 - protein, 5 aa, Homo sapiens
TFAIS

SEQ ID NO: 17882 - protein, 5 aa, Homo sapiens
TFALS

SEQ ID NO: 17883 - protein, 5 aa, Homo sapiens
TFAMH

SEQ ID NO: 17884 - protein, 5 aa, Homo sapiens
TFEMN

SEQ ID NO: 17885 - protein, 5 aa, Homo sapiens
TFGIS

SEQ ID NO: 17886 - protein, 5 aa, Homo sapiens
TFGIT

SEQ ID NO: 17887 - protein, 5 aa, Homo sapiens
TFGLS

SEQ ID NO: 17888 - protein, 5 aa, Homo sapiens
TFGLT

SEQ ID NO: 17889 - protein, 7 aa, Homo sapiens
TFGMGVG

SEQ ID NO: 17890 - protein, 5 aa, Homo sapiens
TFGMH

SEQ ID NO: 17891 - protein, 5 aa, Homo sapiens
TFGMS

SEQ ID NO: 17892 - protein, 14 aa, Homo sapiens
TFHSGINVETYRIY

SEQ ID NO: 17893 - protein, 17 aa, Homo sapiens
TFKKTGEEIHYVDSVKG

SEQ ID NO: 17894 - protein, 15 aa, Homo sapiens
TFSGGFSYYTDSVKG

SEQ ID NO: 17895 - protein, 9 aa, Homo sapiens
TFSSDGGAF

SEQ ID NO: 17896 - protein, 5 aa, Homo sapiens
TFWMN

SEQ ID NO: 17897 - protein, 20 aa, Homo sapiens
TFWNYDFSSAYYHFQYYMDV

SEQ ID NO: 17898 - protein, 14 aa, Homo sapiens
TGASSDVGRYDYVS

SEQ ID NO: 17899 - protein, 8 aa, Homo sapiens
TGDFYYAS

SEQ ID NO: 17900 - protein, 13 aa, Homo sapiens
TGDSNNVDKEGAV

SEQ ID NO: 17901 - protein, 15 aa, Homo sapiens
TGDYDFWSGYLVFDY

SEQ ID NO: 17902 - protein, 14 aa, Homo sapiens
TGGSSNIGAGYDVH

SEQ ID NO: 17903 - protein, 15 aa, Homo sapiens
TGNFDWGSYYNVFDN

SEQ ID NO: 17904 - protein, 13 aa, Homo sapiens
TGNSNNIGSYGVG

SEQ ID NO: 17905 - protein, 13 aa, Homo sapiens
TGNSNNVGNQGAA

SEQ ID NO: 17906 - protein, 13 aa, Homo sapiens
TGNSNNVGNRGAA

SEQ ID NO: 17907 - protein, 13 aa, Homo sapiens
TGNSNNVGTYGVG

SEQ ID NO: 17908 - protein, 13 aa, Homo sapiens
TGNSNSVGRYAVG

SEQ ID NO: 17909 - protein, 13 aa, Homo sapiens
TGNSTTFANQEAA

SEQ ID NO: 17910 - protein, 20 aa, Homo sapiens
TGREWLLSGGFRNHHYYMDV

SEQ ID NO: 17911 - protein, 20 aa, Homo sapiens
TGREWLLTGAFRNHHYYMDV

SEQ ID NO: 17912 - protein, 20 aa, Homo sapiens
TGREWLVSGAFRNHYYYMDV

SEQ ID NO: 17913 - protein, 13 aa, Homo sapiens
TGSGGAIARNYVQ

SEQ ID NO: 17914 - protein, 13 aa, Homo sapiens
TGSGNNVGYQGAA

SEQ ID NO: 17915 - protein, 13 aa, Homo sapiens
TGSSGNIADHYVQ

SEQ ID NO: 17916 - protein, 13 aa, Homo sapiens
TGSSKNIGSYAVG

SEQ ID NO: 17917 - protein, 14 aa, Homo sapiens
TGSSSDIGDYNYVS

SEQ ID NO: 17918 - protein, 14 aa, Homo sapiens
TGSSSDIGRYDYVS

SEQ ID NO: 17919 - protein, 14 aa, Homo sapiens
TGSSSDVGRYDYVS

SEQ ID NO: 17920 - protein, 14 aa, Homo sapiens
TGSSSDVGSYNYVS

SEQ ID NO: 17921 - protein, 14 aa, Homo sapiens
TGSSSNIGAAYDVH

SEQ ID NO: 17922 - protein, 14 aa, Homo sapiens
TGSSSNIGADFDVH

SEQ ID NO: 17923 - protein, 14 aa, Homo sapiens
TGSSSNIGAGFDVH

SEQ ID NO: 17924 - protein, 14 aa, Homo sapiens
TGSSSNIGAGYDVH

SEQ ID NO: 17925 - protein, 14 aa, Homo sapiens
TGSSSNIGARYEVH

SEQ ID NO: 17926 - protein, 14 aa, Homo sapiens
TGSSSNIGASYDVH

SEQ ID NO: 17927 - protein, 14 aa, Homo sapiens
TGSSSNIGATYDVH

SEQ ID NO: 17928 - protein, 14 aa, Homo sapiens
TGSSSNIGTGYDVH

SEQ ID NO: 17929 - protein, 14 aa, Homo sapiens
TGSSTDVGGYNYVS

SEQ ID NO: 17930 - protein, 14 aa, Homo sapiens
TGSTSNIGAGYDVH

SEQ ID NO: 17931 - protein, 14 aa, Homo sapiens
TGTHNDVGGFNYVS

SEQ ID NO: 17932 - protein, 14 aa, Homo sapiens
TGTISDIGDYNYVS

SEQ ID NO: 17933 - protein, 14 aa, Homo sapiens
TGTNSDIGAYNFVS

SEQ ID NO: 17934 - protein, 14 aa, Homo sapiens
TGTNSDVGAYEYVS

SEQ ID NO: 17935 - protein, 14 aa, Homo sapiens
TGTNSDVGGYNYVS

SEQ ID NO: 17936 - protein, 14 aa, Homo sapiens
TGTNSDVGSYNLVS

SEQ ID NO: 17937 - protein, 14 aa, Homo sapiens
TGTNSNVGGYNHVS

SEQ ID NO: 17938 - protein, 14 aa, Homo sapiens
TGTRSDIGTYNYVS

SEQ ID NO: 17939 - protein, 14 aa, Homo sapiens
TGTSGDIGAYNYVS

SEQ ID NO: 17940 - protein, 14 aa, Homo sapiens
TGTSGDVGRYNSLS

SEQ ID NO: 17941 - protein, 14 aa, Homo sapiens
TGTSNDVGAYDSVS

SEQ ID NO: 17942 - protein, 14 aa, Homo sapiens
TGTSNDVGGYNYVS

SEQ ID NO: 17943 - protein, 14 aa, Homo sapiens
TGTSNDVGSYNYVS

SEQ ID NO: 17944 - protein, 14 aa, Homo sapiens
TGTSRDVGGYNYVT

SEQ ID NO: 17945 - protein, 14 aa, Homo sapiens
TGTSRDVGNYNLVS

SEQ ID NO: 17946 - protein, 14 aa, Homo sapiens
TGTSSDFGGYNFVS

SEQ ID NO: 17947 - protein, 14 aa, Homo sapiens
TGTSSDFGSYNLVS

SEQ ID NO: 17948 - protein, 14 aa, Homo sapiens
TGTSSDIGAYNFVS

SEQ ID NO: 17949 - protein, 14 aa, Homo sapiens
TGTSSDIGGYNYVS

SEQ ID NO: 17950 - protein, 14 aa, Homo sapiens
TGTSSDIGNNNHVS

SEQ ID NO: 17951 - protein, 14 aa, Homo sapiens
TGTSSDVGAYNYVS

SEQ ID NO: 17952 - protein, 14 aa, Homo sapiens
TGTSSDVGDYNYVS

SEQ ID NO: 17953 - protein, 14 aa, Homo sapiens
TGTSSDVGGDNYVS

SEQ ID NO: 17954 - protein, 14 aa, Homo sapiens
TGTSSDVGGYKFVS

SEQ ID NO: 17955 - protein, 14 aa, Homo sapiens
TGTSSDVGGYKYVS

SEQ ID NO: 17956 - protein, 14 aa, Homo sapiens
TGTSSDVGGYNFIS

SEQ ID NO: 17957 - protein, 14 aa, Homo sapiens
TGTSSDVGGYNFVS

SEQ ID NO: 17958 - protein, 14 aa, Homo sapiens
TGTSSDVGGYNSVS

SEQ ID NO: 17959 - protein, 14 aa, Homo sapiens
TGTSSDVGGYNYVS

SEQ ID NO: 17960 - protein, 14 aa, Homo sapiens
TGTSSDVGNYNLVS

SEQ ID NO: 17961 - protein, 14 aa, Homo sapiens
TGTSSDVGNYNYVS

SEQ ID NO: 17962 - protein, 14 aa, Homo sapiens
TGTSSDVGRYDYVS

SEQ ID NO: 17963 - protein, 14 aa, Homo sapiens
TGTSSDVGRYKFVS

SEQ ID NO: 17964 - protein, 14 aa, Homo sapiens
TGTSSDVGSFNLVS

SEQ ID NO: 17965 - protein, 14 aa, Homo sapiens
TGTSSDVGSYKFVS

SEQ ID NO: 17966 - protein, 14 aa, Homo sapiens
TGTSSDVGSYNLVS

SEQ ID NO: 17967 - protein, 14 aa, Homo sapiens
TGTSSDVGSYNRVS

SEQ ID NO: 17968 - protein, 14 aa, Homo sapiens
TGTSSDVGTFNLVS

SEQ ID NO: 17969 - protein, 14 aa, Homo sapiens
TGTSSDVGTYKLVS

SEQ ID NO: 17970 - protein, 14 aa, Homo sapiens
TGTSSDVGTYNLVS

SEQ ID NO: 17971 - protein, 14 aa, Homo sapiens
TGTSSDVGTYNSLS

SEQ ID NO: 17972 - protein, 14 aa, Homo sapiens
TGTSSDVGTYNYVS

SEQ ID NO: 17973 - protein, 14 aa, Homo sapiens
TGTSSDVGYYNYVS

SEQ ID NO: 17974 - protein, 14 aa, Homo sapiens
TGTSSDVRSYNYVS

SEQ ID NO: 17975 - protein, 14 aa, Homo sapiens
TGTSSDVVDYNYVS

SEQ ID NO: 17976 - protein, 14 aa, Homo sapiens
TGTSSGVGSDNLVS

SEQ ID NO: 17977 - protein, 14 aa, Homo sapiens
TGTSSNIGAGYDVH

SEQ ID NO: 17978 - protein, 14 aa, Homo sapiens
TGTSSNVGGYNLVS

SEQ ID NO: 17979 - protein, 14 aa, Homo sapiens
TGTSSNVGGYNYVS

SEQ ID NO: 17980 - protein, 14 aa, Homo sapiens
TGTSSNVGRYDYVS

SEQ ID NO: 17981 - protein, 14 aa, Homo sapiens
TGTSTDVGASDSVS

SEQ ID NO: 17982 - protein, 14 aa, Homo sapiens
TGTSTDVGNYNRVS

SEQ ID NO: 17983 - protein, 14 aa, Homo sapiens
TGTTNDVGGYNYVS

SEQ ID NO: 17984 - protein, 14 aa, Homo sapiens
TGTTSDVGAYDRVS

SEQ ID NO: 17985 - protein, 14 aa, Homo sapiens
TGTTSDVGRYNYVS

SEQ ID NO: 17986 - protein, 17 aa, Homo sapiens
TGWTDGGSWVYHHNMDV

SEQ ID NO: 17987 - protein, 5 aa, Homo sapiens
THAFS

SEQ ID NO: 17988 - protein, 5 aa, Homo sapiens
THAMH

SEQ ID NO: 17989 - protein, 5 aa, Homo sapiens
THGIS

SEQ ID NO: 17990 - protein, 5 aa, Homo sapiens
THTMM

SEQ ID NO: 17991 - protein, 5 aa, Homo sapiens
THWIG

SEQ ID NO: 17992 - protein, 5 aa, Homo sapiens
THYIH

SEQ ID NO: 17993 - protein, 15 aa, Homo sapiens
THYYDSSGATNAFDI

SEQ ID NO: 17994 - protein, 16 aa, Homo sapiens
TIGTQSDTFYSGSVEG

SEQ ID NO: 17995 - protein, 16 aa, Homo sapiens
TIHYSGSTYYNPSLKS

SEQ ID NO: 17996 - protein, 17 aa, Homo sapiens
TIKEDGRETYYVDSVKG

SEQ ID NO: 17997 - protein, 17 aa, Homo sapiens
TIKKDGSEKYYVDSVKG

SEQ ID NO: 17998 - protein, 17 aa, Homo sapiens
TIKKDSSEKYFVDSVKG

SEQ ID NO: 17999 - protein, 17 aa, Homo sapiens
TIKPDGTETYYVDSVKG

SEQ ID NO: 18000 - protein, 17 aa, Homo sapiens
TIKQDGSEKYYVDSLKG

SEQ ID NO: 18001 - protein, 17 aa, Homo sapiens
TINKKGDNTHYADSVKG

SEQ ID NO: 18002 - protein, 17 aa, Homo sapiens
TINPIFGITNYAQNFQG

SEQ ID NO: 18003 - protein, 14 aa, Homo sapiens
TIRSGINVGAYRIY

SEQ ID NO: 18004 - protein, 17 aa, Homo sapiens
TISASGGSTYYADSVRG

SEQ ID NO: 18005 - protein, 17 aa, Homo sapiens
TISASGRGTYYPDSVRG

SEQ ID NO: 18006 - protein, 17 aa, Homo sapiens
TISATGGSTYYADSVKG

SEQ ID NO: 18007 - protein, 17 aa, Homo sapiens
TISDSGISTYYADSVKG

SEQ ID NO: 18008 - protein, 17 aa, Homo sapiens
TISGDGRHTYYAESVKG

SEQ ID NO: 18009 - protein, 17 aa, Homo sapiens
TISGDGRSTYYADSVKG

SEQ ID NO: 18010 - protein, 17 aa, Homo sapiens
TISGFDGATHYADSVEG

SEQ ID NO: 18011 - protein, 17 aa, Homo sapiens
TISGIDGATHYADSAEG

SEQ ID NO: 18012 - protein, 17 aa, Homo sapiens
TISGNGDTTYYADSVKG

SEQ ID NO: 18013 - protein, 17 aa, Homo sapiens
TISGNGGSTYYADSVKG

SEQ ID NO: 18014 - protein, 17 aa, Homo sapiens
TISGNGRSTYYANSVKG

SEQ ID NO: 18015 - protein, 17 aa, Homo sapiens
TISGSGGSTSYADSVKG

SEQ ID NO: 18016 - protein, 17 aa, Homo sapiens
TISGSGGSTYYADSVKG

SEQ ID NO: 18017 - protein, 17 aa, Homo sapiens
TISGSGLSTYYADSVKG

SEQ ID NO: 18018 - protein, 17 aa, Homo sapiens
TISGSGNSTYYADSVKG

SEQ ID NO: 18019 - protein, 17 aa, Homo sapiens
TISGTDGSTYYADSVKG

SEQ ID NO: 18020 - protein, 17 aa, Homo sapiens
TISGTGISSYYGDSVKG

SEQ ID NO: 18021 - protein, 17 aa, Homo sapiens
TISGTGLSTYYADSVKG

SEQ ID NO: 18022 - protein, 17 aa, Homo sapiens
TISNSGASTYYADSVRG

SEQ ID NO: 18023 - protein, 16 aa, Homo sapiens
TISNSGTTYYSPSLRS

SEQ ID NO: 18024 - protein, 17 aa, Homo sapiens
TISPSGLSTYYTDSVKG

SEQ ID NO: 18025 - protein, 17 aa, Homo sapiens
TISSNGEHIHYADSVKG

SEQ ID NO: 18026 - protein, 17 aa, Homo sapiens
TISSNGGTTYYANSVSG

SEQ ID NO: 18027 - protein, 17 aa, Homo sapiens
TISSSRLSTYYADSVKG

SEQ ID NO: 18028 - protein, 16 aa, Homo sapiens
TISYSGDTYYNPSLES

SEQ ID NO: 18029 - protein, 17 aa, Homo sapiens
TITGSGISTYYADSVKG

SEQ ID NO: 18030 - protein, 17 aa, Homo sapiens
TITGTGLSTYYADSVKG

SEQ ID NO: 18031 - protein, 16 aa, Homo sapiens
TIWIVVVPAAPGYFDY

SEQ ID NO: 18032 - protein, 16 aa, Homo sapiens
TIYFSGNNYLNPSLKS

SEQ ID NO: 18033 - protein, 16 aa, Homo sapiens
TIYHSGITYYNPSLKS

SEQ ID NO: 18034 - protein, 16 aa, Homo sapiens
TIYHSGSTFYNPSLKS

SEQ ID NO: 18035 - protein, 16 aa, Homo sapiens
TIYSSGTAYYNPSLKS

SEQ ID NO: 18036 - protein, 16 aa, Homo sapiens
TIYSYGTVYYNPSLQS

SEQ ID NO: 18037 - protein, 16 aa, Homo sapiens
TIYYNDRTYENPSLKS

SEQ ID NO: 18038 - protein, 16 aa, Homo sapiens
TIYYNGNTYYNPSLKS

SEQ ID NO: 18039 - protein, 16 aa, Homo sapiens
TIYYRGSTYYNPSLKS

SEQ ID NO: 18040 - protein, 16 aa, Homo sapiens
TIYYSGGTYFNPSLRS

SEQ ID NO: 18041 - protein, 16 aa, Homo sapiens
TIYYSGTTYYSPSLKR

SEQ ID NO: 18042 - protein, 7 aa, Homo sapiens
TKRVGVA

SEQ ID NO: 18043 - protein, 12 aa, Homo sapiens
TKTAMVTSAFDI

SEQ ID NO: 18044 - protein, 12 aa, Homo sapiens
TLDSGHSSYAIA

SEQ ID NO: 18045 - protein, 10 aa, Homo sapiens
TLGGSYEIDY

SEQ ID NO: 18046 - protein, 14 aa, Homo sapiens
TLHRGISVASYRIY

SEQ ID NO: 18047 - protein, 14 aa, Homo sapiens
TLHSGINVDTSKIF

SEQ ID NO: 18048 - protein, 14 aa, Homo sapiens
TLHSGINVGSYRIY

SEQ ID NO: 18049 - protein, 17 aa, Homo sapiens
TLKQDGSKIYYVDSMKG

SEQ ID NO: 18050 - protein, 13 aa, Homo sapiens
TLLEGHSSGWYDY

SEQ ID NO: 18051 - protein, 21 aa, Homo sapiens
TLMQRGIRGYDNGWGPYYFDS

SEQ ID NO: 18052 - protein, 12 aa, Homo sapiens
TLNSGHRDYVIA

SEQ ID NO: 18053 - protein, 12 aa, Homo sapiens
TLNSGHSDYVIA

SEQ ID NO: 18054 - protein, 12 aa, Homo sapiens
TLNSGHSNYGIA

SEQ ID NO: 18055 - protein, 11 aa, Homo sapiens
TLNWGGDAFDI

SEQ ID NO: 18056 - protein, 19 aa, Homo sapiens
TLPENYVDSDGYRGWYFDL

SEQ ID NO: 18057 - protein, 19 aa, Homo sapiens
TLPENYVDTDGYRGWYFDL

SEQ ID NO: 18058 - protein, 15 aa, Homo sapiens
TLREGVKSSDIIFDS

SEQ ID NO: 18059 - protein, 17 aa, Homo sapiens
TLRQDGSEIYYVDSVKG

SEQ ID NO: 18060 - protein, 14 aa, Homo sapiens
TLRSDIDVVAQRIY

SEQ ID NO: 18061 - protein, 14 aa, Homo sapiens
TLRSDINIDTCRIF

SEQ ID NO: 18062 - protein, 14 aa, Homo sapiens
TLRSDINLGTYRIY

SEQ ID NO: 18063 - protein, 14 aa, Homo sapiens
TLRSDINVATSRIY

SEQ ID NO: 18064 - protein, 14 aa, Homo sapiens
TLRSDINVDTSRIF

SEQ ID NO: 18065 - protein, 14 aa, Homo sapiens
TLRSDINVGSNRIY

SEQ ID NO: 18066 - protein, 14 aa, Homo sapiens
TLRSDINVGTYRIY

SEQ ID NO: 18067 - protein, 14 aa, Homo sapiens
TLRSDISVDTYRIF

SEQ ID NO: 18068 - protein, 14 aa, Homo sapiens
TLRSDISVGSHRIY

SEQ ID NO: 18069 - protein, 14 aa, Homo sapiens
TLRSDLNVNTYRIY

SEQ ID NO: 18070 - protein, 14 aa, Homo sapiens
TLRSGIDVGSQRIY

SEQ ID NO: 18071 - protein, 14 aa, Homo sapiens
TLRSGIDVGTYRIY

SEQ ID NO: 18072 - protein, 14 aa, Homo sapiens
TLRSGIDVGTYSIY

SEQ ID NO: 18073 - protein, 14 aa, Homo sapiens
TLRSGINVATYRIY

SEQ ID NO: 18074 - protein, 14 aa, Homo sapiens
TLRSGINVDTYRIF

SEQ ID NO: 18075 - protein, 14 aa, Homo sapiens
TLRSGINVDTYRIY

SEQ ID NO: 18076 - protein, 14 aa, Homo sapiens
TLRSGINVGAYRIF

SEQ ID NO: 18077 - protein, 14 aa, Homo sapiens
TLRSGINVGTYRIY

SEQ ID NO: 18078 - protein, 14 aa, Homo sapiens
TLRSGINVNTYRVY

SEQ ID NO: 18079 - protein, 11 aa, Homo sapiens
TLRWGGDAFDV

SEQ ID NO: 18080 - protein, 17 aa, Homo sapiens
TLSFLDESIYYADSVKG

SEQ ID NO: 18081 - protein, 12 aa, Homo sapiens
TLSRGHSSYAIA

SEQ ID NO: 18082 - protein, 12 aa, Homo sapiens
TLSRGHSTYAIA

SEQ ID NO: 18083 - protein, 12 aa, Homo sapiens
TLSSDYSTYKVD

SEQ ID NO: 18084 - protein, 12 aa, Homo sapiens
TLSSGHINYAIA

SEQ ID NO: 18085 - protein, 12 aa, Homo sapiens
TLSSGHSDYAIA

SEQ ID NO: 18086 - protein, 12 aa, Homo sapiens
TLSSGHSNSAIA

SEQ ID NO: 18087 - protein, 12 aa, Homo sapiens
TLSSGHSNYAIA

SEQ ID NO: 18088 - protein, 12 aa, Homo sapiens
TLSSGHSRYAIA

SEQ ID NO: 18089 - protein, 12 aa, Homo sapiens
TLSSGHSSSAIA

SEQ ID NO: 18090 - protein, 12 aa, Homo sapiens
TLSSGHSSYAIA

SEQ ID NO: 18091 - protein, 12 aa, Homo sapiens
TLSSGHSSYGIA

SEQ ID NO: 18092 - protein, 12 aa, Homo sapiens
TLSSGHSSYIIA

SEQ ID NO: 18093 - protein, 12 aa, Homo sapiens
TLSSGYSNYKVD

SEQ ID NO: 18094 - protein, 12 aa, Homo sapiens
TLTSGYSNYKVD

SEQ ID NO: 18095 - protein, 16 aa, Homo sapiens
TLYYTGITYQSPSLKS

SEQ ID NO: 18096 - protein, 17 aa, Homo sapiens
TMAWTKKSTSSDWYFDL

SEQ ID NO: 18097 - protein, 17 aa, Homo sapiens
TMIPVAFPTYYYYGLDV

SEQ ID NO: 18098 - protein, 16 aa, Homo sapiens
TMRHTGSTLDNPALRS

SEQ ID NO: 18099 - protein, 5 aa, Homo sapiens
TNAFS

SEQ ID NO: 18100 - protein, 5 aa, Homo sapiens
TNAIS

SEQ ID NO: 18101 - protein, 5 aa, Homo sapiens
TNALS

SEQ ID NO: 18102 - protein, 7 aa, Homo sapiens
TNDQRPS

SEQ ID NO: 18103 - protein, 7 aa, Homo sapiens
TNDYFWV

SEQ ID NO: 18104 - protein, 5 aa, Homo sapiens
TNGIS

SEQ ID NO: 18105 - protein, 7 aa, Homo sapiens
TNNQRPS

SEQ ID NO: 18106 - protein, 15 aa, Homo sapiens
TNWIDGGSPFYGLDV

SEQ ID NO: 18107 - protein, 11 aa, Homo sapiens
VLHAAHTAWDY

SEQ ID NO: 18108 - protein, 14 aa, Homo sapiens
VLHSQDYYYYGMDV

SEQ ID NO: 18109 - protein, 97 aa, Homo sapiens
VLLVESGGALVHPGRSLRLSCAASGFTFRDYAMTWVRQAPGKGLEWVSFISPTSLSTYYADSVKGRFTISRDNSKNTLSLQMNSLRAEDTAVYYCAR

SEQ ID NO: 18110 - protein, 122 aa, Homo sapiens
VLLVESGGALVHPGRSLRLSCAASGFTFRDYAMTWVRQAPGKGLEWVSFISPTSLSTYYADSVKGRFTISRDNSKNTLSLQMNSLRAEDTAVYYCARDFARAAYNFGNFDYWGRGTLVTVSS

SEQ ID NO: 18111 - protein, 13 aa, Homo sapiens
VLPGGGGIDAFDI

SEQ ID NO: 18112 - protein, 17 aa, Homo sapiens
VLPGSGKSPSYADFARG

SEQ ID NO: 18113 - protein, 12 aa, Homo sapiens
VLTGRWLQLGPE

SEQ ID NO: 18114 - protein, 94 aa, Homo sapiens
VLTQSPGTLSLSPGETATLSCRASQGLTSSHLAWYQQRPGQAPRLLIYGASNRATGIPNRFTGSGSGTDFTLTINRLEPEDFAVFYCQQYDSSP

SEQ ID NO: 18115 - protein, 105 aa, Homo sapiens
VLTQSPGTLSLSPGETATLSCRASQGLTSSHLAWYQQRPGQAPRLLIYGASNRATGIPNRFTGSGSGTDFTLTINRLEPEDFAVFYCQQYDSSPYTFGQGTKVEI

SEQ ID NO: 18116 - protein, 10 aa, Homo sapiens
VLYMGSGISV

SEQ ID NO: 18117 - protein, 10 aa, Homo sapiens
VLYMGSGIVV

SEQ ID NO: 18118 - protein, 10 aa, Homo sapiens
VLYMGSGIWV

SEQ ID NO: 18119 - protein, 94 aa, Homo sapiens
VMTQSPATLSVSPGDRAVFSCRASQSISYDLAWYQQKPGQAPRLLIYGASTRAAGVPARFSASGSGTEFTLTISTIQSDDFAVYFCQQYNNWPP

SEQ ID NO: 18120 - protein, 106 aa, Homo sapiens
VMTQSPATLSVSPGDRAVFSCRASQSISYDLAWYQQKPGQAPRLLIYGASTRAAGVPARFSASGSGTEFTLTISTIQSDDFAVYFCQQYNNWPPLTFGGGTKVEIK

SEQ ID NO: 18121 - protein, 99 aa, Homo sapiens
VMTQSPDSLAVSLGERATINCKSSQSLFWSDNKKNYLAWYQQKPGQPPKLLIYWASTRESGVPDRFSGSGSGTDFTLTISSLQAEDVAVYYCQQYYDYP

SEQ ID NO: 18122 - protein, 110 aa, Homo sapiens
VMTQSPDSLAVSLGERATINCKSSQSLFWSDNKKNYLAWYQQKPGQPPKLLIYWASTRESGVPDRFSGSGSGTDFTLTISSLQAEDVAVYYCQQYYDYPLTFGAGTKVDI

SEQ ID NO: 18123 - protein, 97 aa, Homo sapiens
VMTQSPLSLAVTPGESASISCRSNQSLLHSNGKNYLDWYVKKPGHPPQLLIHLGFDRASGVPDRFSGSGSATDFTLKISRVEADDVGLYFCMQGLQN

SEQ ID NO: 18124 - protein, 109 aa, Homo sapiens
VMTQSPLSLAVTPGESASISCRSNQSLLHSNGKNYLDWYVKKPGHPPQLLIHLGFDRASGVPDRFSGSGSATDFTLKISRVEADDVGLYFCMQGLQNLTFGGGTRVEIK

SEQ ID NO: 18125 - protein, 98 aa, Homo sapiens
VMTQSPLSLAVTPGQPASISCRSSQSLVYSDGDTYLNWFQQRPGQPPRRLIYKVSNRDSGVPDRFSGSGSGTDFTLRISRVEAEDAGLYYCMQGTNWP

SEQ ID NO: 18126 - protein, 110 aa, Homo sapiens
VMTQSPLSLAVTPGQPASISCRSSQSLVYSDGDTYLNWFQQRPGQPPRRLIYKVSNRDSGVPDRFSGSGSGTDFTLRISRVEAEDAGLYYCMQGTNWPYSFGRGTKLEIK

SEQ ID NO: 18127 - protein, 96 aa, Homo sapiens
VMTQTPLSLSVTPGQPASMSCKSDQSLLHSDGKTYLSWYLQRPGQSPHLLIYEVSGRFSGVPDRFSGSGSGTDFTLKISRVQAEDVGVYYCMQGLH

SEQ ID NO: 18128 - protein, 110 aa, Homo sapiens
VMTQTPLSLSVTPGQPASMSCKSDQSLLHSDGKTYLSWYLQRPGQSPHLLIYEVSGRFSGVPDRFSGSGSGTDFTLKISRVQAEDVGVYYCMQGLHPPFTFGPGTKVDIK

SEQ ID NO: 18129 - protein, 96 aa, Homo sapiens
VMTQTPLSSPVTLGQPASISCNSSQSLVYSDGDTYLNCFQQRPGQSPRRLINKVSNWDSGVPDRFSGSGSGTDFTLKISRMEAEDVGVYFCMQDTH

SEQ ID NO: 18130 - protein, 111 aa, Homo sapiens
VMTQTPLSSPVTLGQPASISCNSSQSLVYSDGDTYLNCFQQRPGQSPRRLINKVSNWDSGVPDRFSGSGSGTDFTLKISRMEAEDVGVYFCMQDTHCLPHFRRWDQGGDQT

SEQ ID NO: 18131 - protein, 9 aa, Homo sapiens
VMVRGVITY

SEQ ID NO: 18132 - protein, 11 aa, Homo sapiens
VNNDGSHSKGD

SEQ ID NO: 18133 - protein, 16 aa, Homo sapiens
VNQWLGGGVYYYYMNV

SEQ ID NO: 18134 - protein, 11 aa, Homo sapiens
VNSDGSHIKGD

SEQ ID NO: 18135 - protein, 11 aa, Homo sapiens
VNSDGSHNKGD

SEQ ID NO: 18136 - protein, 11 aa, Homo sapiens
VNSDGSYTKGD

SEQ ID NO: 18137 - protein, 17 aa, Homo sapiens
VPASRCDGDSCYPIFDY

SEQ ID NO: 18138 - protein, 13 aa, Homo sapiens
VPASSSWGSAVDY

SEQ ID NO: 18139 - protein, 12 aa, Homo sapiens
VPFVRGPIDLDY

SEQ ID NO: 18140 - protein, 17 aa, Homo sapiens
VPRERCKSGDCYPIFDS

SEQ ID NO: 18141 - protein, 17 aa, Homo sapiens
VPRGIAVAGTPRGAFDI

SEQ ID NO: 18142 - protein, 11 aa, Homo sapiens
VPRGVKSSWDD

SEQ ID NO: 18143 - protein, 9 aa, Homo sapiens
VPTVAGIDY

SEQ ID NO: 18144 - protein, 13 aa, Homo sapiens
VPWYSESRFDVDP

SEQ ID NO: 18145 - protein, 9 aa, Homo sapiens
VPYGSSPDF

SEQ ID NO: 18146 - protein, 12 aa, Homo sapiens
VQDIINPRAFDF

SEQ ID NO: 18147 - protein, 97 aa, Homo sapiens
VQLEQSGAEVKKPGSSVKVSCKASGGAFNSYAVIWVRQAPGQGLEWMGGINPMFKIVNYAQKFQGRVTITADAFPSTAYMELNSLTSEDTAVYYCAR

SEQ ID NO: 18148 - protein, 121 aa, Homo sapiens
VQLEQSGAEVKKPGSSVKVSCKASGGAFNSYAVIWVRQAPGQGLEWMGGINPMFKIVNYAQKFQGRVTITADAFPSTAYMELNSLTSEDTAVYYCARGPNYHDTNTYLDPWGQGTLVIVSS

SEQ ID NO: 18149 - protein, 97 aa, Homo sapiens
VQLLESGGGLVQPGGSLRLSCAASGFTFSSYAMHWVRQAPGKGLEWVAVISYDGSNKYYADSVKGRFTISRDNSKNTLYLQMNSLRAEDTAVYYCAR

SEQ ID NO: 18150 - protein, 123 aa, Homo sapiens
VQLLESGGGLVQPGGSLRLSCAASGFTFSSYAMHWVRQAPGKGLEWVAVISYDGSNKYYADSVKGRFTISRDNSKNTLYLQMNSLRAEDTAVYYCARDDIVVVPAATWSFDYWGQGTLVTVSS

SEQ ID NO: 18151 - protein, 97 aa, Homo sapiens
VQLLESGGGLVQPGGTLRLSCAASGFTFSSYGMYWVRQAPGKGLEWVSSISGSGLSTYYADSVKGRFTISRDNSKNTLYLHMNSLRGEDTAVYYCAK

SEQ ID NO: 18152 - protein, 122 aa, Homo sapiens
VQLLESGGGLVQPGGTLRLSCAASGFTFSSYGMYWVRQAPGKGLEWVSSISGSGLSTYYADSVKGRFTISRDNSKNTLYLHMNSLRGEDTAVYYCAKDYSTFIAVAGTFDYWGQGTLVTVSS

SEQ ID NO: 18153 - protein, 95 aa, Homo sapiens
VQLMESGGGLVQPGGSLRLSCTAPGLSISNNYMNWVRQAPGKGLEWVSIINIDGTKKYADSVKGRFTISRDNSANTLHLQMNALRPDDTALYYCA

SEQ ID NO: 18154 - protein, 114 aa, Homo sapiens
VQLMESGGGLVQPGGSLRLSCTAPGLSISNNYMNWVRQAPGKGLEWVSIINIDGTKKYADSVKGRFTISRDNSANTLHLQMNALRPDDTALYYCAGGDWGIDYWGLGTLVTVSS

SEQ ID NO: 18155 - protein, 96 aa, Homo sapiens
VQLQESGPGLLKPSQTLSLTCIVSGDTVSGVNYYWSWIRQPAGKGLEYIGRVSDRGSAHYSPSLKNRVTISVDTSKKTFSLKMTSVTAADTAVYYC

SEQ ID NO: 18156 - protein, 120 aa, Homo sapiens
VQLQESGPGLLKPSQTLSLTCIVSGDTVSGVNYYWSWIRQPAGKGLEYIGRVSDRGSAHYSPSLKNRVTISVDTSKKTFSLKMTSVTAADTAVYYCGANGDYLGWGVDQWGQGTLVTVSS

SEQ ID NO: 18157 - protein, 97 aa, Homo sapiens
VQLVEAGGGVVQPGRSLRLSCAASGFTFSNYAMHWVRQAPGKGLEWVAVISYDGTNKYYAESVKGRFTISRDNSKNTLHLQMNSLKIKDTGLYYCAR

SEQ ID NO: 18158 - protein, 121 aa, Homo sapiens
VQLVEAGGGVVQPGRSLRLSCAASGFTFSNYAMHWVRQAPGKGLEWVAVISYDGTNKYYAESVKGRFTISRDNSKNTLHLQMNSLKIKDTGLYYCARDEGAAAGNGEFDYWGQGTLVTVYS

SEQ ID NO: 18159 - protein, 97 aa, Homo sapiens
VQLVESGGDLVQPGGSLRLSCAASGFTFNKHWMSWVRQAPGEGLEWVADIKQDGSNKYYVDSVKGRFTISRDNAKSSVYLQMNSLRDEDTAVYYCVR

SEQ ID NO: 18160 - protein, 120 aa, Homo sapiens
VQLVESGGDLVQPGGSLRLSCAASGFTFNKHWMSWVRQAPGEGLEWVADIKQDGSNKYYVDSVKGRFTISRDNAKSSVYLQMNSLRDEDTAVYYCVRDDSSGNVDAFDIWGQGTMVTVSS

SEQ ID NO: 18161 - protein, 96 aa, Homo sapiens
VQLVESGGDLVQPGGSLRLSCSASGFAFSRFAMHWVRQAPGKGLEYVSAIGTNGDTYYSDSVKGRFTISRDNSKNTLYLQMNSLRAEDTAVYYCAK

SEQ ID NO: 18162 - protein, 121 aa, Homo sapiens
VQLVESGGDLVQPGGSLRLSCSASGFAFSRFAMHWVRQAPGKGLEYVSAIGTNGDTYYSDSVKGRFTISRDNSKNTLYLQMNSLRAEDTAVYYCAKEPHPFSSGDYYFDYWGQGTLVTVSS

SEQ ID NO: 18163 - protein, 96 aa, Homo sapiens
VQLVESGGGLRQPGGSLRLSCAASGFTVSSKYMSWVRQAPGKGLEWVSVIYSGDITYYSNSVRGRFTISRDNSRNTLYLQMNSLRAEDTAVYYCAR

SEQ ID NO: 18164 - protein, 118 aa, Homo sapiens
VQLVESGGGLRQPGGSLRLSCAASGFTVSSKYMSWVRQAPGKGLEWVSVIYSGDITYYSNSVRGRFTISRDNSRNTLYLQMNSLRAEDTAVYYCARGTDSAATRVDAWGQGTTVTVSS

SEQ ID NO: 18165 - protein, 96 aa, Homo sapiens
VQLVESGGGLVKPGGSLRLSCAASGFTVSSKYMSWVRQAPGKGLEWVSVIYSGDITYYSNSVRGRFTISRDNSRNTLYLQMNSLRAEDTAVYYCAR

SEQ ID NO: 18166 - protein, 118 aa, Homo sapiens
VQLVESGGGLVKPGGSLRLSCAASGFTVSSKYMSWVRQAPGKGLEWVSVIYSGDITYYSNSVRGRFTISRDNSRNTLYLQMNSLRAEDTAVYYCARGTDSAATRVDAWGQGTTVTVSS

SEQ ID NO: 18167 - protein, 97 aa, Homo sapiens
VQLVESGGGLVQPGGSLRLSCAASGFIFSGYSMSWVRQAPGKGLEWVASIKEDGRQKYYVDSVKGRCTISRDNARNSLFLQMNSLRAEDSAVYYCAR

SEQ ID NO: 18168 - protein, 123 aa, Homo sapiens
VQLVESGGGLVQPGGSLRLSCAASGFIFSGYSMSWVRQAPGKGLEWVASIKEDGRQKYYVDSVKGRCTISRDNARNSLFLQMNSLRAEDSAVYYCARIYHFEKGGHYRHFDYWGQGTQATVSS

SEQ ID NO: 18169 - protein, 97 aa, Homo sapiens
VQLVESGGGLVQPGGSLRLSCAASGFRLSNYWMSWVRQAPGKGLQWVASIKEDGREKSYVASVEGRHAISRDNANNFLYLQMNSLRVEDTAIYYCAR

SEQ ID NO: 18170 - protein, 123 aa, Homo sapiens
VQLVESGGGLVQPGGSLRLSCAASGFRLSNYWMSWVRQAPGKGLQWVASIKEDGREKSYVASVEGRHAISRDNANNFLYLQMNSLRVEDTAIYYCARHSYWDKSTHYRHFDYWGQGALVTVSS

SEQ ID NO: 18171 - protein, 97 aa, Homo sapiens
VQLVESGGGLVQPGGSLRLSCAASGFSFSSYEMHWIRQAPGKGLEWVSYISSSGLSTYYADPVKGRFTVSRDNSKNSVYLQMNSLRAEDTAVYYCAR

SEQ ID NO: 18172 - protein, 121 aa, Homo sapiens
VQLVESGGGLVQPGGSLRLSCAASGFSFSSYEMHWIRQAPGKGLEWVSYISSSGLSTYYADPVKGRFTVSRDNSKNSVYLQMNSLRAEDTAVYYCARDQFRQVVFLGLDYWGQGALVTVSS

SEQ ID NO: 18173 - protein, 97 aa, Homo sapiens
VQLVESGGGLVQPGGSLRLSCAASGFTFSSYGMHWVRQAPGKGLEWVAVISYDGSNKYYADSVKGRFTISRDNSKNTLYLQMNSLRAEDTAVYFCAK

SEQ ID NO: 18174 - protein, 127 aa, Homo sapiens
VQLVESGGGLVQPGGSLRLSCAASGFTFSSYGMHWVRQAPGKGLEWVAVISYDGSNKYYADSVKGRFTISRDNSKNTLYLQMNSLRAEDTAVYFCAKELAVRLLRYFDWINSPFDYWGQGTLVTVSS

SEQ ID NO: 18175 - protein, 97 aa, Homo sapiens
VQLVESGGGLVRPGESLRLSCAASGFNFDTYWMSWVRQAPGKGLEWVADIREDGGKTYYGDSAKGRFTISRDNAKNSLYLQMYSLRAGDTAVYYCVR

SEQ ID NO: 18176 - protein, 120 aa, Homo sapiens
VQLVESGGGLVRPGESLRLSCAASGFNFDTYWMSWVRQAPGKGLEWVADIREDGGKTYYGDSAKGRFTISRDNAKNSLYLQMYSLRAGDTAVYYCVREGYCTGGGCYPIWGRGTLITVSS

SEQ ID NO: 18177 - protein, 97 aa, Homo sapiens
VQLVESGGGVVQPGRSLRLSCAASGFGFSSYGMHWVRQAPGKGLEWVAVISYDGGMRYYADSLQGRFTISRDNSQNTLYLQMYSLRVEDTAVYFCAK

SEQ ID NO: 18178 - protein, 123 aa, Homo sapiens
VQLVESGGGVVQPGRSLRLSCAASGFGFSSYGMHWVRQAPGKGLEWVAVISYDGGMRYYADSLQGRFTISRDNSQNTLYLQMYSLRVEDTAVYFCAKDVVSPSNDWYSALDIWGQGTSVTVSA

SEQ ID NO: 18179 - protein, 96 aa, Homo sapiens
VQLVESGGGVVQPGRSLRLSCAASGFTFSSYFMNWVRQAPGKGLEWVSSITSSGTYIYYADSVKGRFTISRDNAKNSLYLQMNSLRAEDTAVYYCA

SEQ ID NO: 18180 - protein, 120 aa, Homo sapiens
VQLVESGGGVVQPGRSLRLSCAASGFTFSSYFMNWVRQAPGKGLEWVSSITSSGTYIYYADSVKGRFTISRDNAKNSLYLQMNSLRAEDTAVYYCATSTEDTLSYYFDYWGQGALVTVSS

SEQ ID NO: 18181 - protein, 97 aa, Homo sapiens
VQLVESGGNLVPPGGSLRLSCVASGFTVNSYWMHWIRQAPGKGLEWVANIKEDGSKIYYLDSVKGRFTISRDNAKNSLYLQMNSLRAEDTAIYYCAR

SEQ ID NO: 18182 - protein, 116 aa, Homo sapiens
VQLVESGGNLVPPGGSLRLSCVASGFTVNSYWMHWIRQAPGKGLEWVANIKEDGSKIYYLDSVKGRFTISRDNAKNSLYLQMNSLRAEDTAIYYCARQLGGGDCLWGQGTLVTVSS

SEQ ID NO: 18183 - protein, 96 aa, Homo sapiens
VQLVQSGAEVKKPGASVKVSCKASGYTFSDYYMHWVRQAPGQGLEWMGRVNPKNGGTDYARKFQGRVSMTSDTSISTSYMDLNNLGSDDTAVYFCA

SEQ ID NO: 18184 - protein, 131 aa, Homo sapiens
VQLVQSGAEVKKPGASVKVSCKASGYTFSDYYMHWVRQAPGQGLEWMGRVNPKNGGTDYARKFQGRVSMTSDTSISTSYMDLNNLGSDDTAVYFCAQGGEMASMAALMRGSLRRDDFPDYWGQGTLVTVSS

SEQ ID NO: 18185 - protein, 97 aa, Homo sapiens
VQLVQSGAEVKKPGASVKVSCKASGYTFTGYYIHWVRQAPGQGLEWMGRINPNTGGTNSAQKFRGRVTMTRDTSLSTAYMDISTLRSDDTAVYYCAR

SEQ ID NO: 18186 - protein, 120 aa, Homo sapiens
VQLVQSGAEVKKPGASVKVSCKASGYTFTGYYIHWVRQAPGQGLEWMGRINPNTGGTNSAQKFRGRVTMTRDTSLSTAYMDISTLRSDDTAVYYCARSGRLSPVHWFDPWGQGTLVTVSS

SEQ ID NO: 18187 - protein, 97 aa, Homo sapiens
VQLVQSGAEVKKPGDSVRVSCKASGYTFNDNYIHWMRQAPGQALEWMGWINPKRGDTTYAQKFQGRVTMARDTSINTAYMELSGLKSDDTAVYYCAR

SEQ ID NO: 18188 - protein, 124 aa, Homo sapiens
VQLVQSGAEVKKPGDSVRVSCKASGYTFNDNYIHWMRQAPGQALEWMGWINPKRGDTTYAQKFQGRVTMARDTSINTAYMELSGLKSDDTAVYYCARGCLCSLDSTGYRPLDYWGQGALVTVSS

SEQ ID NO: 18189 - protein, 97 aa, Homo sapiens
VQLVQSGAEVKKPGDSVRVSCKASGYTFSDYYIHWVRQAPGQAPEYMGWINPNKGDTSYAQKFQGRVTMASDSSISTAYVELSGLRSDDTAVYYCAR

SEQ ID NO: 18190 - protein, 124 aa, Homo sapiens
VQLVQSGAEVKKPGDSVRVSCKASGYTFSDYYIHWVRQAPGQAPEYMGWINPNKGDTSYAQKFQGRVTMASDSSISTAYVELSGLRSDDTAVYYCARGCICSLDSTGYRPLDHWGQGALVTVSS

SEQ ID NO: 18191 - protein, 97 aa, Homo sapiens
VQLVQSGAEVRKPGASVKVSCKPSGYNFTNYLIHWVRQAPGQGLEWMGIINPSGGSTTYAQKFQGRVTMTTDMSTNTVYMELSSLRSEDTALYFCAR

SEQ ID NO: 18192 - protein, 130 aa, Homo sapiens
VQLVQSGAEVRKPGASVKVSCKPSGYNFTNYLIHWVRQAPGQGLEWMGIINPSGGSTTYAQKFQGRVTMTTDMSTNTVYMELSSLRSEDTALYFCARDPPPYKCDRSGSSLQYCYGMDVWGQGTTVTVSS

SEQ ID NO: 18193 - protein, 97 aa, Homo sapiens
VQLVQSGPEVKKPGENLKISCKGSGYSFSSYWIGWVRQMPGKGLEWMGVIHPHNSDTTYSPSFQGQVTISVDKSISTAYLQWESLKASDTAIYYCAR

SEQ ID NO: 18194 - protein, 128 aa, Homo sapiens
VQLVQSGPEVKKPGENLKISCKGSGYSFSSYWIGWVRQMPGKGLEWMGVIHPHNSDTTYSPSFQGQVTISVDKSISTAYLQWESLKASDTAIYYCARHPETFYYYDSSRGKRDAFAIWGQGTVVTVSS

SEQ ID NO: 18195 - protein, 18 aa, Homo sapiens
VQLYDGSNDKYYADSVKG

SEQ ID NO: 18196 - protein, 15 aa, Homo sapiens
VQSYDRQDYYRHFDY

SEQ ID NO: 18197 - protein, 8 aa, Homo sapiens
VQTTQSVA

SEQ ID NO: 18198 - protein, 98 aa, Homo sapiens
VQVVESGGGLVQPGQSLRLSCTVSGFPLGDYAVGWFRQAPGKGLEWVGFMRSKAYGGTIEYAASVKGRFTISRDDSKSVAYLEMTSLKTEDTAVYYCG

SEQ ID NO: 18199 - protein, 125 aa, Homo sapiens
VQVVESGGGLVQPGQSLRLSCTVSGFPLGDYAVGWFRQAPGKGLEWVGFMRSKAYGGTIEYAASVKGRFTISRDDSKSVAYLEMTSLKTEDTAVYYCGRPMKPEWLLRHSNFHYWGQGTLVTVSS

SEQ ID NO: 18200 - protein, 15 aa, Homo sapiens
VQWYDKANSYRHFDS

SEQ ID NO: 18201 - protein, 14 aa, Homo sapiens
VREDVIPLAGTLDY

SEQ ID NO: 18202 - protein, 8 aa, Homo sapiens
VRFGSGWY

SEQ ID NO: 18203 - protein, 97 aa, Homo sapiens
VRLEESGGGLVQPGGSLRLSCAASGFTFSNYWMGWVRQAPGKGLEWVANIKQDGSEEKYVDSVKGRFTISRDNAKNSLDLQMNSLRVDDTAVYYCAR

SEQ ID NO: 18204 - protein, 122 aa, Homo sapiens
VRLEESGGGLVQPGGSLRLSCAASGFTFSNYWMGWVRQAPGKGLEWVANIKQDGSEEKYVDSVKGRFTISRDNAKNSLDLQMNSLRVDDTAVYYCARLFLYEDSGYRNFDYWGQGTLVIVSS

SEQ ID NO: 18205 - protein, 14 aa, Homo sapiens
VRLREASAYNPIDF

SEQ ID NO: 18206 - protein, 97 aa, Homo sapiens
VRLVESGGALVQPGGSLTLSCEGSGFTFSHYYMSWVRLPPGKGLEWVANINQDGSRKNYLGSVRDRFTVSRDNAENSMFLQMNSLRAEDTAVYFCAR

SEQ ID NO: 18207 - protein, 123 aa, Homo sapiens
VRLVESGGALVQPGGSLTLSCEGSGFTFSHYYMSWVRLPPGKGLEWVANINQDGSRKNYLGSVRDRFTVSRDNAENSMFLQMNSLRAEDTAVYFCARVQWYDKANSYRHFDSWGQGTLVTVSS

SEQ ID NO: 18208 - protein, 97 aa, Homo sapiens
VRLVQSGSEVKKPGASVKVSCKASGYTFSKYGIDWVRQAPGQGLEWMGWISPYNYNTRYAEKLQGRVTLTTDTSTGTAYMELKSLTSDDTAVYYCAR

SEQ ID NO: 18209 - protein, 123 aa, Homo sapiens
VRLVQSGSEVKKPGASVKVSCKASGYTFSKYGIDWVRQAPGQGLEWMGWISPYNYNTRYAEKLQGRVTLTTDTSTGTAYMELKSLTSDDTAVYYCARDFKGRGGSDLGYFDYWGQGTLVTVSS

SEQ ID NO: 18210 - protein, 97 aa, Homo sapiens
VRLVQSGTEVKKPGASVKVSCKASGYTFSKFGIDWVRQAPGQGLEWMGWISPYNYNTRYSEKLQGRLTLTTDTSTGTTYMELKSLTSDDTAVYYCAR

SEQ ID NO: 18211 - protein, 123 aa, Homo sapiens
VRLVQSGTEVKKPGASVKVSCKASGYTFSKFGIDWVRQAPGQGLEWMGWISPYNYNTRYSEKLQGRLTLTTDTSTGTTYMELKSLTSDDTAVYYCARDFKGRGGSDLGYFDYWGQGTLVTVSS

SEQ ID NO: 18212 - protein, 13 aa, Homo sapiens
VRRPGRDNSCWDS

SEQ ID NO: 18213 - protein, 18 aa, Homo sapiens
VRSGDYDSSGYYPYYFDY

SEQ ID NO: 18214 - protein, 17 aa, Homo sapiens
VRSYYGSGTSYGDSYDI

SEQ ID NO: 18215 - protein, 16 aa, Homo sapiens
VRVLRYFDWQAIPTDY

SEQ ID NO: 18216 - protein, 14 aa, Homo sapiens
VRYFDWLTGGYFDY

SEQ ID NO: 18217 - protein, 14 aa, Homo sapiens
VSADCSGATCPFGY

SEQ ID NO: 18218 - protein, 16 aa, Homo sapiens
VSEWLGGGVYYYYMDV

SEQ ID NO: 18219 - protein, 15 aa, Homo sapiens
VSGVPDYTALYFFDY

SEQ ID NO: 18220 - protein, 10 aa, Homo sapiens
VSHFNWESDY

SEQ ID NO: 18221 - protein, 12 aa, Homo sapiens
VSIDPVPRPFDP

SEQ ID NO: 18222 - protein, 19 aa, Homo sapiens
VSPAYYDILTGYQTGYMDV

SEQ ID NO: 18223 - protein, 19 aa, Homo sapiens
VSRNKANKYTTEYAASVKG

SEQ ID NO: 18224 - protein, 11 aa, Homo sapiens
VSSDGTHNKGD

SEQ ID NO: 18225 - protein, 12 aa, Homo sapiens
VSSGTDCWALDI

SEQ ID NO: 18226 - protein, 8 aa, Homo sapiens
VSSLLLWA

SEQ ID NO: 18227 - protein, 11 aa, Homo sapiens
VSTYYYYYMEV

SEQ ID NO: 18228 - protein, 11 aa, Homo sapiens
VSWHDGLDGWV

SEQ ID NO: 18229 - protein, 10 aa, Homo sapiens
VTAQRGYFLS

SEQ ID NO: 18230 - protein, 12 aa, Homo sapiens
VTSDSYIWVFDF

SEQ ID NO: 18231 - protein, 17 aa, Homo sapiens
VTSHDGSLTYHADSVKG

SEQ ID NO: 18232 - protein, 12 aa, Homo sapiens
VTVAGTRYYFDY

SEQ ID NO: 18233 - protein, 16 aa, Homo sapiens
VTYTGGSADYADSVKG

SEQ ID NO: 18234 - protein, 7 aa, Homo sapiens
VVHPMDV

SEQ ID NO: 18235 - protein, 99 aa, Homo sapiens
VVMTQSPLSLLVTLGQPASISCRSSQSLVYSGGNTFLHWFHQRPGQSPRRLIYEVSNRDSGVPDRFSGSGSGTDFTLEISRVEAEDVGIYYCMQGTHWP

SEQ ID NO: 18236 - protein, 111 aa, Homo sapiens
VVMTQSPLSLLVTLGQPASISCRSSQSLVYSGGNTFLHWFHQRPGQSPRRLIYEVSNRDSGVPDRFSGSGSGTDFTLEISRVEAEDVGIYYCMQGTHWPLTFGGGTKVEIK

SEQ ID NO: 18237 - protein, 99 aa, Homo sapiens
VVMTQSPLSLPVTLGQPASISCRSSQGLVYSDGVTYFNWFQQRPGQSPRRLIFEVSNRDSGVPDRFSGSASGTDFTLKISRVEAEDVGVYYCMQGTHWP

SEQ ID NO: 18238 - protein, 111 aa, Homo sapiens
VVMTQSPLSLPVTLGQPASISCRSSQGLVYSDGVTYFNWFQQRPGQSPRRLIFEVSNRDSGVPDRFSGSASGTDFTLKISRVEAEDVGVYYCMQGTHWPYTFGQGTKLEVK

SEQ ID NO: 18239 - protein, 99 aa, Homo sapiens
VVMTQSPPSLSVILGQSASISCWSSESLQYNDGKTYLHWFQQRPGQSPRRLIYQVSNRDSGVPERFSGSGSGTGFTLKISRVEAEDVGVYYCMQGKSWP

SEQ ID NO: 18240 - protein, 111 aa, Homo sapiens
VVMTQSPPSLSVILGQSASISCWSSESLQYNDGKTYLHWFQQRPGQSPRRLIYQVSNRDSGVPERFSGSGSGTGFTLKISRVEAEDVGVYYCMQGKSWPGSFGGGTKLEIK

SEQ ID NO: 18241 - protein, 97 aa, Homo sapiens
VVMTQTPLSLSVTPGQPASISCRSSQSLLHDDGHTYMYWYIQRPGRSPQLLMSEVSSRFSGVPDRFSGSGSGTDFTLKISRVEAEDVGVYYCMQGKH

SEQ ID NO: 18242 - protein, 112 aa, Homo sapiens
VVMTQTPLSLSVTPGQPASISCRSSQSLLHDDGHTYMYWYIQRPGRSPQLLMSEVSSRFSGVPDRFSGSGSGTDFTLKISRVEAEDVGVYYCMQGKHWKEFTFGPGTKVDIK

SEQ ID NO: 18243 - protein, 14 aa, Homo sapiens
VVPDDILTGYHLDY

SEQ ID NO: 18244 - protein, 17 aa, Homo sapiens
VVSYDGRTEHYADSVKG

SEQ ID NO: 18245 - protein, 95 aa, Homo sapiens
VVTQEPSLTVSPGGAVTLTCASSTGAVTSGFYPNWFQQKPGQAPRALIYSTSNKHSWTPARFSGSLLGGKAALTLSGVQPEDEAEYYCLLYYGGA

SEQ ID NO: 18246 - protein, 107 aa, Homo sapiens
VVTQEPSLTVSPGGAVTLTCASSTGAVTSGFYPNWFQQKPGQAPRALIYSTSNKHSWTPARFSGSLLGGKAALTLSGVQPEDEAEYYCLLYYGGAWVFGGGTKLTVL

SEQ ID NO: 18247 - protein, 13 aa, Homo sapiens
VVVRYYYYYYMDV

SEQ ID NO: 18248 - protein, 15 aa, Homo sapiens
VVVVAATPSAPYFDY

SEQ ID NO: 18249 - protein, 17 aa, Homo sapiens
VVWSDGTTKYYADSVKG

SEQ ID NO: 18250 - protein, 13 aa, Homo sapiens
VWETEAYRRPFDY

SEQ ID NO: 18251 - protein, 5 aa, Homo sapiens
VYAMH

SEQ ID NO: 18252 - protein, 5 aa, Homo sapiens
VYGMH

SEQ ID NO: 18253 - protein, 5 aa, Homo sapiens
VYSMH

SEQ ID NO: 18254 - protein, 14 aa, Homo sapiens
VYTIFGVVRGYFDY

SEQ ID NO: 18255 - protein, 13 aa, Homo sapiens
WAFGDYGMGAFDV

SEQ ID NO: 18256 - protein, 7 aa, Homo sapiens
WAFTRES

SEQ ID NO: 18257 - protein, 7 aa, Homo sapiens
WANNRES

SEQ ID NO: 18258 - protein, 11 aa, Homo sapiens
WANQSVSSNLA

SEQ ID NO: 18259 - protein, 7 aa, Homo sapiens
WASARAS

SEQ ID NO: 18260 - protein, 7 aa, Homo sapiens
WASAREF

SEQ ID NO: 18261 - protein, 7 aa, Homo sapiens
WASAREP

SEQ ID NO: 18262 - protein, 7 aa, Homo sapiens
WASARES

SEQ ID NO: 18263 - protein, 7 aa, Homo sapiens
WASARNS

SEQ ID NO: 18264 - protein, 7 aa, Homo sapiens
WASARQS

SEQ ID NO: 18265 - protein, 7 aa, Homo sapiens
WASDRES

SEQ ID NO: 18266 - protein, 7 aa, Homo sapiens
WASIRAP

SEQ ID NO: 18267 - protein, 7 aa, Homo sapiens
WASIRES

SEQ ID NO: 18268 - protein, 7 aa, Homo sapiens
WASNRES

SEQ ID NO: 18269 - protein, 11 aa, Homo sapiens
WASQDISSDLA

SEQ ID NO: 18270 - protein, 11 aa, Homo sapiens
WASQSVSSNLA

SEQ ID NO: 18271 - protein, 7 aa, Homo sapiens
WASSRES

SEQ ID NO: 18272 - protein, 7 aa, Homo sapiens
WASTRAS

SEQ ID NO: 18273 - protein, 7 aa, Homo sapiens
WASTRDS

SEQ ID NO: 18274 - protein, 7 aa, Homo sapiens
WASTREP

SEQ ID NO: 18275 - protein, 7 aa, Homo sapiens
WASTRES

SEQ ID NO: 18276 - protein, 7 aa, Homo sapiens
WASTRGS

SEQ ID NO: 18277 - protein, 7 aa, Homo sapiens
WASTRKS

SEQ ID NO: 18278 - protein, 7 aa, Homo sapiens
WASTRQS

SEQ ID NO: 18279 - protein, 7 aa, Homo sapiens
WASVRES

SEQ ID NO: 18280 - protein, 7 aa, Homo sapiens
WATTRES

SEQ ID NO: 18281 - protein, 13 aa, Homo sapiens
WEGVPAAMSWFDP

SEQ ID NO: 18282 - protein, 13 aa, Homo sapiens
WFSGRYYSFGFDN

SEQ ID NO: 18283 - protein, 7 aa, Homo sapiens
WGEGLDY

SEQ ID NO: 18284 - protein, 17 aa, Homo sapiens
WGGGLKQLVLVGDAFDI

SEQ ID NO: 18285 - protein, 12 aa, Homo sapiens
WGKYRSWELLDY

SEQ ID NO: 18286 - protein, 7 aa, Homo sapiens
WGSNRAS

SEQ ID NO: 18287 - protein, 12 aa, Homo sapiens
WGVLSFGTKFDP

SEQ ID NO: 18288 - protein, 22 aa, Homo sapiens
WGYCSGGSCYSGGWDYYYGMDV

SEQ ID NO: 18289 - protein, 10 aa, Homo sapiens
WGYLDIIGHN

SEQ ID NO: 18290 - protein, 17 aa, Homo sapiens
WIDPKNGNTNYAQKFQG

SEQ ID NO: 18291 - protein, 17 aa, Homo sapiens
WIDPNSGKTGYAQKFQG

SEQ ID NO: 18292 - protein, 17 aa, Homo sapiens
WIDPSSGGTKFAQHFQG

SEQ ID NO: 18293 - protein, 17 aa, Homo sapiens
WIHTYNGNSKYSQKFLG

SEQ ID NO: 18294 - protein, 17 aa, Homo sapiens
WIKPKNGATNYAQKFQG

SEQ ID NO: 18295 - protein, 17 aa, Homo sapiens
WIKPKNGATNYAQQFQG

SEQ ID NO: 18296 - protein, 17 aa, Homo sapiens
WIKPNSGGTNYVQKFQG

SEQ ID NO: 18297 - protein, 17 aa, Homo sapiens
WIKVKNGDTKYTERFKG

SEQ ID NO: 18298 - protein, 17 aa, Homo sapiens
WINAANGNTKYSQKFQD

SEQ ID NO: 18299 - protein, 17 aa, Homo sapiens
WINADSGATKYSEKFQD

SEQ ID NO: 18300 - protein, 17 aa, Homo sapiens
WINAGNDETEYAQKFQG

SEQ ID NO: 18301 - protein, 17 aa, Homo sapiens
WINAGNGDAKYSQKFQD

SEQ ID NO: 18302 - protein, 17 aa, Homo sapiens
WINAGNGNTKYSQKFQG

SEQ ID NO: 18303 - protein, 17 aa, Homo sapiens
WINANNGGTKYAPKFQG

SEQ ID NO: 18304 - protein, 17 aa, Homo sapiens
WINAYKGNTNYAQKFQD

SEQ ID NO: 18305 - protein, 17 aa, Homo sapiens
WINGANDHTKYAQKFQV

SEQ ID NO: 18306 - protein, 17 aa, Homo sapiens
WINGGNGKTQYSQALQG

SEQ ID NO: 18307 - protein, 17 aa, Homo sapiens
WINGNTGNPTYAQGFTG

SEQ ID NO: 18308 - protein, 17 aa, Homo sapiens
WINPDNGNTISSPDFQG

SEQ ID NO: 18309 - protein, 17 aa, Homo sapiens
WINPDSGRTNYAQRFQG

SEQ ID NO: 18310 - protein, 17 aa, Homo sapiens
WINPDTGDSKYAQKFQG

SEQ ID NO: 18311 - protein, 17 aa, Homo sapiens
WINPKGDVTSYGQKFQG

SEQ ID NO: 18312 - protein, 17 aa, Homo sapiens
WINPKRGDTTYAQKFQG

SEQ ID NO: 18313 - protein, 17 aa, Homo sapiens
WINPKSGDTSSTEKFQG

SEQ ID NO: 18314 - protein, 17 aa, Homo sapiens
WINPNKGDTSYAQKFQG

SEQ ID NO: 18315 - protein, 17 aa, Homo sapiens
WINPNNGATDYARRFQG

SEQ ID NO: 18316 - protein, 17 aa, Homo sapiens
WINPNNGDTKYVQKFQD

SEQ ID NO: 18317 - protein, 17 aa, Homo sapiens
WINPNNGGTNFVQKFQG

SEQ ID NO: 18318 - protein, 17 aa, Homo sapiens
WINPNSGDTNYAQKFQG

SEQ ID NO: 18319 - protein, 17 aa, Homo sapiens
WINPNSGDTSSAQKFQG

SEQ ID NO: 18320 - protein, 17 aa, Homo sapiens
WINPNSGGTDSAQKFQG

SEQ ID NO: 18321 - protein, 17 aa, Homo sapiens
WINPNSGGTKYPPNFQG

SEQ ID NO: 18322 - protein, 17 aa, Homo sapiens
WINPNSGGTNYAQKFKG

SEQ ID NO: 18323 - protein, 17 aa, Homo sapiens
WINPNSGGTNYAQKFQG

SEQ ID NO: 18324 - protein, 17 aa, Homo sapiens
WINPNSGGTNYAQKFRG

SEQ ID NO: 18325 - protein, 17 aa, Homo sapiens
WINPNSGGTNYAQKSQG

SEQ ID NO: 18326 - protein, 17 aa, Homo sapiens
WINPNSGGTNYARNFQG

SEQ ID NO: 18327 - protein, 17 aa, Homo sapiens
WINPNSGTTNYAQKFQG

SEQ ID NO: 18328 - protein, 17 aa, Homo sapiens
WINPNTGDTIYAQKFQG

SEQ ID NO: 18329 - protein, 17 aa, Homo sapiens
WINPNTGDTKYAQKFQD

SEQ ID NO: 18330 - protein, 17 aa, Homo sapiens
WINPNTGGTNFAQKFQG

SEQ ID NO: 18331 - protein, 17 aa, Homo sapiens
WINPRSGATNYAQKFQE

SEQ ID NO: 18332 - protein, 17 aa, Homo sapiens
WINPRSGGTKYAQRFQG

SEQ ID NO: 18333 - protein, 17 aa, Homo sapiens
WINPVSGGTNYAQKFEG

SEQ ID NO: 18334 - protein, 17 aa, Homo sapiens
WINSDNGHTKYSQKFQD

SEQ ID NO: 18335 - protein, 17 aa, Homo sapiens
WINTANDKIYYGQRFKG

SEQ ID NO: 18336 - protein, 17 aa, Homo sapiens
WINTDKGNTKYSQRFED

SEQ ID NO: 18337 - protein, 17 aa, Homo sapiens
WINTGNGNTRYSQKFQG

SEQ ID NO: 18338 - protein, 17 aa, Homo sapiens
WINTHNGNTAYAQTFQG

SEQ ID NO: 18339 - protein, 17 aa, Homo sapiens
WINTITGKPTYAQAFTG

SEQ ID NO: 18340 - protein, 17 aa, Homo sapiens
WINTITGKSTYAQAFTG

SEQ ID NO: 18341 - protein, 17 aa, Homo sapiens
WINTNTGDPTYAQGFTG

SEQ ID NO: 18342 - protein, 17 aa, Homo sapiens
WINTNTGNPTYAQGFTG

SEQ ID NO: 18343 - protein, 17 aa, Homo sapiens
WINVYNGKTDYAQRFQD

SEQ ID NO: 18344 - protein, 17 aa, Homo sapiens
WISADSDNTKYSQKFQD

SEQ ID NO: 18345 - protein, 17 aa, Homo sapiens
WISAHNGATKYKQKLQG

SEQ ID NO: 18346 - protein, 17 aa, Homo sapiens
WISAHNGDTKFEEKFQG

SEQ ID NO: 18347 - protein, 17 aa, Homo sapiens
WISAHNGDTKYIEKFQG

SEQ ID NO: 18348 - protein, 17 aa, Homo sapiens
WISAHNGNIKYAQKFQD

SEQ ID NO: 18349 - protein, 17 aa, Homo sapiens
WISAKNGRTEYAQKFQG

SEQ ID NO: 18350 - protein, 17 aa, Homo sapiens
WISANNGNTNYAQKFQG

SEQ ID NO: 18351 - protein, 17 aa, Homo sapiens
WISAYNDKTQYAQNFQD

SEQ ID NO: 18352 - protein, 17 aa, Homo sapiens
WISAYNGDTNYAQKLQG

SEQ ID NO: 18353 - protein, 17 aa, Homo sapiens
WISAYNGKTKYAQKLQG

SEQ ID NO: 18354 - protein, 17 aa, Homo sapiens
WISAYNGNRNYAQKFQG

SEQ ID NO: 18355 - protein, 17 aa, Homo sapiens
WISAYNGNTEYAQKFQG

SEQ ID NO: 18356 - protein, 17 aa, Homo sapiens
WISAYNGNTKSAQKFEG

SEQ ID NO: 18357 - protein, 17 aa, Homo sapiens
WISAYNGNTNSAQKFQD

SEQ ID NO: 18358 - protein, 17 aa, Homo sapiens
WISAYNGNTNYAQKFQG

SEQ ID NO: 18359 - protein, 17 aa, Homo sapiens
WISAYNGNTNYAQKLQD

SEQ ID NO: 18360 - protein, 17 aa, Homo sapiens
WISAYNGNTNYAQKLQG

SEQ ID NO: 18361 - protein, 17 aa, Homo sapiens
WISAYNGNTNYEQKLQG

SEQ ID NO: 18362 - protein, 17 aa, Homo sapiens
WISAYNGNTNYVKKFQG

SEQ ID NO: 18363 - protein, 17 aa, Homo sapiens
WISAYSGHTNHAQKFQD

SEQ ID NO: 18364 - protein, 17 aa, Homo sapiens
WISAYTGNTHYAQKFQD

SEQ ID NO: 18365 - protein, 17 aa, Homo sapiens
WISGHNGDTIYAQMFQG

SEQ ID NO: 18366 - protein, 17 aa, Homo sapiens
WISGHNGDTKYAQSLQG

SEQ ID NO: 18367 - protein, 17 aa, Homo sapiens
WISGHNGDTSYAQKFQG

SEQ ID NO: 18368 - protein, 17 aa, Homo sapiens
WISGHNGDTSYSHKLQD

SEQ ID NO: 18369 - protein, 17 aa, Homo sapiens
WISGHNGDTSYSHKLQG

SEQ ID NO: 18370 - protein, 20 aa, Homo sapiens
WISGKNGADYKINNVQKFQG

SEQ ID NO: 18371 - protein, 17 aa, Homo sapiens
WISGNNDYTNYTQKFQG

SEQ ID NO: 18372 - protein, 20 aa, Homo sapiens
WISGNNGADYNMNNVQKFQG

SEQ ID NO: 18373 - protein, 17 aa, Homo sapiens
WISGQNDDTRFGQNVQG

SEQ ID NO: 18374 - protein, 17 aa, Homo sapiens
WISGYNGDTNYHQNLQG

SEQ ID NO: 18375 - protein, 17 aa, Homo sapiens
WISGYNGDTSYSQKLQG

SEQ ID NO: 18376 - protein, 17 aa, Homo sapiens
WISGYNGDTTYSQKLQG

SEQ ID NO: 18377 - protein, 17 aa, Homo sapiens
WISGYNGHTNFAQNFQG

SEQ ID NO: 18378 - protein, 17 aa, Homo sapiens
WISGYNGQTNYAEKFQD

SEQ ID NO: 18379 - protein, 17 aa, Homo sapiens
WISGYTGDTKYAQKFQG

SEQ ID NO: 18380 - protein, 17 aa, Homo sapiens
WISIYNGNTNYALKFQG

SEQ ID NO: 18381 - protein, 17 aa, Homo sapiens
WISPGNGKTKYSQEFEG

SEQ ID NO: 18382 - protein, 17 aa, Homo sapiens
WISPHSGKTSYAQKFQG

SEQ ID NO: 18383 - protein, 17 aa, Homo sapiens
WISPIDGETEIAQKFQA

SEQ ID NO: 18384 - protein, 17 aa, Homo sapiens
WISPKGDVTSYGQKFQG

SEQ ID NO: 18385 - protein, 17 aa, Homo sapiens
WISPQDVNAQYAQKFQG

SEQ ID NO: 18386 - protein, 17 aa, Homo sapiens
WISPYNGNTNFAQKFQG

SEQ ID NO: 18387 - protein, 17 aa, Homo sapiens
WISPYNYNTRYAEKLQG

SEQ ID NO: 18388 - protein, 17 aa, Homo sapiens
WISPYNYNTRYSEKLQG

SEQ ID NO: 18389 - protein, 17 aa, Homo sapiens
WISSHNGDMRVAQKFQD

SEQ ID NO: 18390 - protein, 17 aa, Homo sapiens
WISSVDGNTNYGQKFQG

SEQ ID NO: 18391 - protein, 16 aa, Homo sapiens
WISSYGNTKYAQKLQG

SEQ ID NO: 18392 - protein, 17 aa, Homo sapiens
WISSYNGNTNYAQKFQD

SEQ ID NO: 18393 - protein, 17 aa, Homo sapiens
WISTSNGNTNYAQKFQG

SEQ ID NO: 18394 - protein, 17 aa, Homo sapiens
WISTYSGSSRFAHRLQD

SEQ ID NO: 18395 - protein, 17 aa, Homo sapiens
WISVNSHQTYYAENFQA

SEQ ID NO: 18396 - protein, 17 aa, Homo sapiens
WISVYNGATNYTQKLRG

SEQ ID NO: 18397 - protein, 17 aa, Homo sapiens
WISVYNGDTKFPQKLQG

SEQ ID NO: 18398 - protein, 17 aa, Homo sapiens
WISVYNGKANYGQKFQG

SEQ ID NO: 18399 - protein, 17 aa, Homo sapiens
WISVYNGNTNYAQNLQG

SEQ ID NO: 18400 - protein, 17 aa, Homo sapiens
WITADIGNTNYAQKFQG

SEQ ID NO: 18401 - protein, 17 aa, Homo sapiens
WITAYDGNTKYAQKFQG

SEQ ID NO: 18402 - protein, 17 aa, Homo sapiens
WITPSKGNTHYAQKFQD

SEQ ID NO: 18403 - protein, 17 aa, Homo sapiens
WITTYNGNTKYTQRLQG

SEQ ID NO: 18404 - protein, 17 aa, Homo sapiens
WIVVGSGNTNYEQKFQE

SEQ ID NO: 18405 - protein, 10 aa, Homo sapiens
WKEGDNWKPY

SEQ ID NO: 18406 - protein, 12 aa, Homo sapiens
WKTTGLMGAFDI

SEQ ID NO: 18407 - protein, 17 aa, Homo sapiens
WLNPNSGNTGYVQKLQG

SEQ ID NO: 18408 - protein, 17 aa, Homo sapiens
WMDPNSGGTNSAQNFQG

SEQ ID NO: 18409 - protein, 17 aa, Homo sapiens
WMLPDSGNTGYAQKFQG

SEQ ID NO: 18410 - protein, 17 aa, Homo sapiens
WMNPISGKTGLEKKFQG

SEQ ID NO: 18411 - protein, 17 aa, Homo sapiens
WMNPNSGDTGFAPKFQG

SEQ ID NO: 18412 - protein, 17 aa, Homo sapiens
WMNPNSGDTNYAQRFQG

SEQ ID NO: 18413 - protein, 17 aa, Homo sapiens
WMNPNSGNRGYARKFQG

SEQ ID NO: 18414 - protein, 17 aa, Homo sapiens
WMNPNSGNTGYAEKFQG

SEQ ID NO: 18415 - protein, 17 aa, Homo sapiens
WMNPNSGNTGYAQKFQG

SEQ ID NO: 18416 - protein, 17 aa, Homo sapiens
WMNPNTGNTGYAEKFQG

SEQ ID NO: 18417 - protein, 17 aa, Homo sapiens
WMNPQRGNTGHAQKFQG

SEQ ID NO: 18418 - protein, 17 aa, Homo sapiens
WMNPSSGKTGYAEKFQG

SEQ ID NO: 18419 - protein, 17 aa, Homo sapiens
WMTPNNGKTAFAQKFQG

SEQ ID NO: 18420 - protein, 19 aa, Homo sapiens
WRDYDIETSYSTGGDAFDV

SEQ ID NO: 18421 - protein, 13 aa, Homo sapiens
WSGYHYSYNYMDV

SEQ ID NO: 18422 - protein, 16 aa, Homo sapiens
WSSESLQYNDGKTYLH

SEQ ID NO: 18423 - protein, 16 aa, Homo sapiens
WSSHSLVYKDDNTYLN

SEQ ID NO: 18424 - protein, 17 aa, Homo sapiens
WSSPYNGNTKYAQKFQG

SEQ ID NO: 18425 - protein, 17 aa, Homo sapiens
WSSQSVFYRSNKKNYLA

SEQ ID NO: 18426 - protein, 7 aa, Homo sapiens
WTSTLEN

SEQ ID NO: 18427 - protein, 17 aa, Homo sapiens
WVDPKTGKTGYAQKFQG

SEQ ID NO: 18428 - protein, 17 aa, Homo sapiens
WVDPTSGDTNLAPKFRG

SEQ ID NO: 18429 - protein, 17 aa, Homo sapiens
WVKPRSGDTNYAQKFQG

SEQ ID NO: 18430 - protein, 17 aa, Homo sapiens
WVNTANGNTKSSQKFQG

SEQ ID NO: 18431 - protein, 17 aa, Homo sapiens
WVNTDNGNTKPSQKFQG

SEQ ID NO: 18432 - protein, 17 aa, Homo sapiens
WVSAYNGNTNYAQKFQG

SEQ ID NO: 18433 - protein, 17 aa, Homo sapiens
WVSGDNGNTNYAQKLQD

SEQ ID NO: 18434 - protein, 17 aa, Homo sapiens
WVSGFNGNTKSAQNLQG

SEQ ID NO: 18435 - protein, 13 aa, Homo sapiens
WVSGTYYSVGFDS

SEQ ID NO: 18436 - protein, 17 aa, Homo sapiens
WVSGYNGNKKFAQKIQG

SEQ ID NO: 18437 - protein, 17 aa, Homo sapiens
WVSPYNGKTTYAQKVQD

SEQ ID NO: 18438 - protein, 17 aa, Homo sapiens
WYYDILTSYQRHDPFDI

SEQ ID NO: 18439 - protein, 15 aa, Homo sapiens
YANNKDIFYADSVKG

SEQ ID NO: 18440 - protein, 7 aa, Homo sapiens
YASKSIS

SEQ ID NO: 18441 - protein, 7 aa, Homo sapiens
YASQSFS

SEQ ID NO: 18442 - protein, 7 aa, Homo sapiens
YASQSIS

SEQ ID NO: 18443 - protein, 14 aa, Homo sapiens
YCSGGGCTGNYMDV

SEQ ID NO: 18444 - protein, 15 aa, Homo sapiens
YCSTASCPTRRAFDI

SEQ ID NO: 18445 - protein, 7 aa, Homo sapiens
YDDLLPS

SEQ ID NO: 18446 - protein, 13 aa, Homo sapiens
YDFDSNGYYRLDP

SEQ ID NO: 18447 - protein, 7 aa, Homo sapiens
YDNDRPS

SEQ ID NO: 18448 - protein, 7 aa, Homo sapiens
YDSDRPS

SEQ ID NO: 18449 - protein, 13 aa, Homo sapiens
YGGSFPLGGYMDV

SEQ ID NO: 18450 - protein, 11 aa, Homo sapiens
YGIVGEYYFDF

SEQ ID NO: 18451 - protein, 4 aa, Homo sapiens
YGMH

SEQ ID NO: 18452 - protein, 67 aa, Homo sapiens
YGMHWVRQAPGKGLEWVAVIWYDGSDKNYADSVKGRFTISRDNFKNTLYLQMNNLRAEDTAVYFCAR

SEQ ID NO: 18453 - protein, 94 aa, Homo sapiens
YGMHWVRQAPGKGLEWVAVIWYDGSDKNYADSVKGRFTISRDNFKNTLYLQMNNLRAEDTAVYFCARDPSALAAAGTEGWFDPWGQGTLVTVSS

SEQ ID NO: 18454 - protein, 15 aa, Homo sapiens
YGRDIAAAGIDAFDI

SEQ ID NO: 18455 - protein, 14 aa, Homo sapiens
YGSGSSSPYYPMDV

SEQ ID NO: 18456 - protein, 16 aa, Homo sapiens
YIDYSGRTNYNPSLKS

SEQ ID NO: 18457 - protein, 16 aa, Homo sapiens
YIFSSANTMYNPSLRS

SEQ ID NO: 18458 - protein, 16 aa, Homo sapiens
YIFYNGNTFYNPSLRS

SEQ ID NO: 18459 - protein, 16 aa, Homo sapiens
YIFYNGRTYTNPSLKS

SEQ ID NO: 18460 - protein, 16 aa, Homo sapiens
YIFYTGRTNYNPSLRS

SEQ ID NO: 18461 - protein, 17 aa, Homo sapiens
YIGDTGRKIYYADSVEG

SEQ ID NO: 18462 - protein, 17 aa, Homo sapiens
YIGDTGRKTYYADSVKG

SEQ ID NO: 18463 - protein, 17 aa, Homo sapiens
YIGDTGRRTYYADSVKG

SEQ ID NO: 18464 - protein, 17 aa, Homo sapiens
YIGDTGRTSYYADSVQG

SEQ ID NO: 18465 - protein, 17 aa, Homo sapiens
YIGDTGRTSYYGDSVRG

SEQ ID NO: 18466 - protein, 17 aa, Homo sapiens
YIGSRSETIYYADSVKG

SEQ ID NO: 18467 - protein, 17 aa, Homo sapiens
YIGSSGNIIYYKDSVKG

SEQ ID NO: 18468 - protein, 16 aa, Homo sapiens
YIGTDGRISYRDSVKG

SEQ ID NO: 18469 - protein, 16 aa, Homo sapiens
YIHYRGRTNYNPSLKN

SEQ ID NO: 18470 - protein, 16 aa, Homo sapiens
YIHYSGNSNYNPSLNS

SEQ ID NO: 18471 - protein, 16 aa, Homo sapiens
YIHYSGNTKYNPSLKS

SEQ ID NO: 18472 - protein, 16 aa, Homo sapiens
YIHYSGRINYNVPLKS

SEQ ID NO: 18473 - protein, 16 aa, Homo sapiens
YIHYSGRTNYNPSLKS

SEQ ID NO: 18474 - protein, 16 aa, Homo sapiens
YIHYSGSTYYNPSLKS

SEQ ID NO: 18475 - protein, 17 aa, Homo sapiens
YIKQDGSEKYYVDTVEG

SEQ ID NO: 18476 - protein, 17 aa, Homo sapiens
YIKQDGTEKDYVDSVKG

SEQ ID NO: 18477 - protein, 17 aa, Homo sapiens
YIKRDGSEENYVDSVRG

SEQ ID NO: 18478 - protein, 17 aa, Homo sapiens
YINAYNGNTNYPQNFED

SEQ ID NO: 18479 - protein, 17 aa, Homo sapiens
YINERGDNIYYADSVKG

SEQ ID NO: 18480 - protein, 17 aa, Homo sapiens
YINGESKGVYYGDSVKG

SEQ ID NO: 18481 - protein, 17 aa, Homo sapiens
YINPKSDSTYYADSVKG

SEQ ID NO: 18482 - protein, 17 aa, Homo sapiens
YINSSSTNIHYADSVKG

SEQ ID NO: 18483 - protein, 17 aa, Homo sapiens
YINSSSTNIHYGDSVKG

SEQ ID NO: 18484 - protein, 19 aa, Homo sapiens
YIRHKASGGTIEYAASVKG

SEQ ID NO: 18485 - protein, 17 aa, Homo sapiens
YIRINGGGTYYADSVKG

SEQ ID NO: 18486 - protein, 17 aa, Homo sapiens
YIRINGGKIYYADSVKG

SEQ ID NO: 18487 - protein, 17 aa, Homo sapiens
YIRINGGNDYYAESVKG

SEQ ID NO: 18488 - protein, 19 aa, Homo sapiens
YIRSKAFGEKTDYAASVKG

SEQ ID NO: 18489 - protein, 19 aa, Homo sapiens
YIRSKAQDGTVERAASVKD

SEQ ID NO: 18490 - protein, 20 aa, Homo sapiens
YIRSSSGSSNDIYYADSVKG

SEQ ID NO: 18491 - protein, 17 aa, Homo sapiens
YISATGGSTYYADSVKG

SEQ ID NO: 18492 - protein, 17 aa, Homo sapiens
YISATGGSTYYEDSVKG

SEQ ID NO: 18493 - protein, 17 aa, Homo sapiens
YISATSLSTYYTDSVKG

SEQ ID NO: 18494 - protein, 17 aa, Homo sapiens
YISDSSGSRYYADSVKG

SEQ ID NO: 18495 - protein, 17 aa, Homo sapiens
YISDSTGSVYYADSVEG

SEQ ID NO: 18496 - protein, 17 aa, Homo sapiens
YISESSLSIYYADSVKG

SEQ ID NO: 18497 - protein, 17 aa, Homo sapiens
YISGDSKSIYYADSAKG

SEQ ID NO: 18498 - protein, 17 aa, Homo sapiens
YISGGGDTMYYADSVKG

SEQ ID NO: 18499 - protein, 16 aa, Homo sapiens
YISGGGSTNYNPSLRS

SEQ ID NO: 18500 - protein, 17 aa, Homo sapiens
YISGSGGTIYYAESVKG

SEQ ID NO: 18501 - protein, 17 aa, Homo sapiens
YISGSGISTYYADSVKG

SEQ ID NO: 18502 - protein, 17 aa, Homo sapiens
YISGSGTTIYYADSVKG

SEQ ID NO: 18503 - protein, 17 aa, Homo sapiens
YISGSSLSTYYADSAKG

SEQ ID NO: 18504 - protein, 18 aa, Homo sapiens
YISGSSRNSIFYADSVKG

SEQ ID NO: 18505 - protein, 16 aa, Homo sapiens
YISHSGITYFNPSLRS

SEQ ID NO: 18506 - protein, 16 aa, Homo sapiens
YISHSGITYYNPSLKS

SEQ ID NO: 18507 - protein, 17 aa, Homo sapiens
YISHSSSDIYYVDSVKG

SEQ ID NO: 18508 - protein, 17 aa, Homo sapiens
YISHTGNTIYYADSLKG

SEQ ID NO: 18509 - protein, 17 aa, Homo sapiens
YISIRGDIRYYADSVKG

SEQ ID NO: 18510 - protein, 7 aa, Homo sapiens
YISNRFS

SEQ ID NO: 18511 - protein, 17 aa, Homo sapiens
YISNSGISIYYAAAVKG

SEQ ID NO: 18512 - protein, 17 aa, Homo sapiens
YISPSDYIIYYVDSVKG

SEQ ID NO: 18513 - protein, 16 aa, Homo sapiens
YISPTGNTNYNPSLKN

SEQ ID NO: 18514 - protein, 17 aa, Homo sapiens
YISRSGSTIYYSDSVKG

SEQ ID NO: 18515 - protein, 17 aa, Homo sapiens
YISSGGDTKNYADSVKG

SEQ ID NO: 18516 - protein, 17 aa, Homo sapiens
YISSGGDTMYYADSVKG

SEQ ID NO: 18517 - protein, 17 aa, Homo sapiens
YISSGGDTRFYADSVKG

SEQ ID NO: 18518 - protein, 19 aa, Homo sapiens
YISSRGGGSTVYYADSVKG

SEQ ID NO: 18519 - protein, 16 aa, Homo sapiens
YISSRGRTNYNPSLKR

SEQ ID NO: 18520 - protein, 17 aa, Homo sapiens
YISSSGDKIYYADSVKG

SEQ ID NO: 18521 - protein, 17 aa, Homo sapiens
YISSSGDTIYYADSVKG

SEQ ID NO: 18522 - protein, 17 aa, Homo sapiens
YISSSGFTIYYADSVKG

SEQ ID NO: 18523 - protein, 17 aa, Homo sapiens
YISSSGFTVHYADSVKG

SEQ ID NO: 18524 - protein, 17 aa, Homo sapiens
YISSSGGDIYHADSVKG

SEQ ID NO: 18525 - protein, 17 aa, Homo sapiens
YISSSGGSRYYADSVKG

SEQ ID NO: 18526 - protein, 17 aa, Homo sapiens
YISSSGISIYYAASVKG

SEQ ID NO: 18527 - protein, 17 aa, Homo sapiens
YISSSGLSTYYADPVKG

SEQ ID NO: 18528 - protein, 17 aa, Homo sapiens
YISSSGRSIYYEASVKG

SEQ ID NO: 18529 - protein, 16 aa, Homo sapiens
YISSSGRTNYNPSLRS

SEQ ID NO: 18530 - protein, 17 aa, Homo sapiens
YISSSGSDIYYADSVKG

SEQ ID NO: 18531 - protein, 17 aa, Homo sapiens
YISSSGSTIYYADSVKG

SEQ ID NO: 18532 - protein, 17 aa, Homo sapiens
YISSSGYIIYYADSVKG

SEQ ID NO: 18533 - protein, 17 aa, Homo sapiens
YISSSGYTIYYADSVKG

SEQ ID NO: 18534 - protein, 17 aa, Homo sapiens
YISSSRGSMYYADSVKG

SEQ ID NO: 18535 - protein, 17 aa, Homo sapiens
YISSSSATIYYAGSVRG

SEQ ID NO: 18536 - protein, 17 aa, Homo sapiens
YISSSSDKIYYADSVKG

SEQ ID NO: 18537 - protein, 17 aa, Homo sapiens
YISSSSGSKYYADSVKG

SEQ ID NO: 18538 - protein, 17 aa, Homo sapiens
YISSSSKTIYYADSVKG

SEQ ID NO: 18539 - protein, 17 aa, Homo sapiens
YISSSSLSIYYADSVKG

SEQ ID NO: 18540 - protein, 17 aa, Homo sapiens
YISSSSLSKYYADSVKG

SEQ ID NO: 18541 - protein, 17 aa, Homo sapiens
YISSSSLSKYYGDSVKG

SEQ ID NO: 18542 - protein, 17 aa, Homo sapiens
YISSSSLSRYYADSVKG

SEQ ID NO: 18543 - protein, 17 aa, Homo sapiens
YISSSSLSTYYVDSVKG

SEQ ID NO: 18544 - protein, 17 aa, Homo sapiens
YISSSSRPIYYADSVKG

SEQ ID NO: 18545 - protein, 17 aa, Homo sapiens
YISSSSSTIYYADSVKG

SEQ ID NO: 18546 - protein, 17 aa, Homo sapiens
YISSSSSTMYYADSVKG

SEQ ID NO: 18547 - protein, 17 aa, Homo sapiens
YISSSSSYTNYADSVKG

SEQ ID NO: 18548 - protein, 17 aa, Homo sapiens
YISSTSGSKYYADTVKG

SEQ ID NO: 18549 - protein, 17 aa, Homo sapiens
YISSTTITRYYADSVKG

SEQ ID NO: 18550 - protein, 17 aa, Homo sapiens
YISSVGSTTYYADSVKG

SEQ ID NO: 18551 - protein, 17 aa, Homo sapiens
YISTSGITKYYADSVKG

SEQ ID NO: 18552 - protein, 17 aa, Homo sapiens
YISTSGLSIYYAAAVKG

SEQ ID NO: 18553 - protein, 17 aa, Homo sapiens
YISTSGYTIYYADSVKG

SEQ ID NO: 18554 - protein, 17 aa, Homo sapiens
YISTSSLSTYYADSVKG

SEQ ID NO: 18555 - protein, 17 aa, Homo sapiens
YISTTGNMVYYADSVKG

SEQ ID NO: 18556 - protein, 17 aa, Homo sapiens
YISTTSGSKYYAAFVKG

SEQ ID NO: 18557 - protein, 17 aa, Homo sapiens
YISVSANSKYYADSVKG

SEQ ID NO: 18558 - protein, 16 aa, Homo sapiens
YISYNGRTNYNPSLKS

SEQ ID NO: 18559 - protein, 16 aa, Homo sapiens
YISYSGGTNYIPSLKS

SEQ ID NO: 18560 - protein, 21 aa, Homo sapiens
YISYSGRTNSGRTNYNPSLKS

SEQ ID NO: 18561 - protein, 16 aa, Homo sapiens
YISYSGSTNYIPSLKS

SEQ ID NO: 18562 - protein, 17 aa, Homo sapiens
YISYSRSSINYADSVKG

SEQ ID NO: 18563 - protein, 17 aa, Homo sapiens
YITIDNSTVYYADSVKG

SEQ ID NO: 18564 - protein, 17 aa, Homo sapiens
YITSRSRTVYYAGSVKG

SEQ ID NO: 18565 - protein, 18 aa, Homo sapiens
YIVGSSRNTVYYADSVKG

SEQ ID NO: 18566 - protein, 16 aa, Homo sapiens
YIYASGRTKSNPSLKS

SEQ ID NO: 18567 - protein, 16 aa, Homo sapiens
YIYDSGRTKSNPSLQS

SEQ ID NO: 18568 - protein, 16 aa, Homo sapiens
YIYGSGSTNYNPSLKS

SEQ ID NO: 18569 - protein, 16 aa, Homo sapiens
YIYHSGSTYYNPSLKS

SEQ ID NO: 18570 - protein, 16 aa, Homo sapiens
YIYNSGSAKYNPSLKS

SEQ ID NO: 18571 - protein, 16 aa, Homo sapiens
YIYNSGSTHYNPSLKS

SEQ ID NO: 18572 - protein, 16 aa, Homo sapiens
YIYNTGRSNYNPSLKS

SEQ ID NO: 18573 - protein, 16 aa, Homo sapiens
YIYSSGRTNYNPSLKS

SEQ ID NO: 18574 - protein, 16 aa, Homo sapiens
YIYSSGSTNYNPSLKT

SEQ ID NO: 18575 - protein, 16 aa, Homo sapiens
YIYTSGSTNYNPSLKS

SEQ ID NO: 18576 - protein, 16 aa, Homo sapiens
YIYYGGSTDYNPSLKS

SEQ ID NO: 18577 - protein, 16 aa, Homo sapiens
YIYYNGGTDYNPSLKS

SEQ ID NO: 18578 - protein, 16 aa, Homo sapiens
YIYYNGRTNYNPSLKS

SEQ ID NO: 18579 - protein, 16 aa, Homo sapiens
YIYYSGNTIYNPALRS

SEQ ID NO: 18580 - protein, 16 aa, Homo sapiens
YIYYSGRTDYNPSLKS

SEQ ID NO: 18581 - protein, 16 aa, Homo sapiens
YIYYSGRTYYNPSLKS

SEQ ID NO: 18582 - protein, 16 aa, Homo sapiens
YIYYSGSSDYNPSLKS

SEQ ID NO: 18583 - protein, 16 aa, Homo sapiens
YIYYSGSTDYNPSLKS

SEQ ID NO: 18584 - protein, 16 aa, Homo sapiens
YIYYSGSTKYNPSLKS

SEQ ID NO: 18585 - protein, 16 aa, Homo sapiens
YIYYSGSTNYNPSLKS

SEQ ID NO: 18586 - protein, 16 aa, Homo sapiens
YIYYSGSTYYNPSLKS

SEQ ID NO: 18587 - protein, 16 aa, Homo sapiens
YIYYSGSTYYNPSLQS

SEQ ID NO: 18588 - protein, 15 aa, Homo sapiens
YIYYSGTNYNPSLKS

SEQ ID NO: 18589 - protein, 16 aa, Homo sapiens
YIYYSGTTSYNPSLKS

SEQ ID NO: 18590 - protein, 16 aa, Homo sapiens
YIYYTGRTKYNPSLQS

SEQ ID NO: 18591 - protein, 16 aa, Homo sapiens
YIYYTGRTNYNPSFKS

SEQ ID NO: 18592 - protein, 16 aa, Homo sapiens
YIYYTGRTNYNPSLKS

SEQ ID NO: 18593 - protein, 11 aa, Homo sapiens
YKSDLDNQKGS

SEQ ID NO: 18594 - protein, 11 aa, Homo sapiens
YKSDLHKQQGS

SEQ ID NO: 18595 - protein, 11 aa, Homo sapiens
YKSDSDHHQGS

SEQ ID NO: 18596 - protein, 11 aa, Homo sapiens
YKSDSDKQQGS

SEQ ID NO: 18597 - protein, 11 aa, Homo sapiens
YKSDSEKHQGS

SEQ ID NO: 18598 - protein, 16 aa, Homo sapiens
YLFNSGSTRYNPSLNS

SEQ ID NO: 18599 - protein, 15 aa, Homo sapiens
YLNYNGSGKRGGMDV

SEQ ID NO: 18600 - protein, 17 aa, Homo sapiens
YMDSRGNAIYYADSVKG

SEQ ID NO: 18601 - protein, 16 aa, Homo sapiens
YMYYGRTTKDNPSLKS

SEQ ID NO: 18602 - protein, 16 aa, Homo sapiens
YMYYRGSPIYSPSLES

SEQ ID NO: 18603 - protein, 11 aa, Homo sapiens
YNSDSHKEQGS

SEQ ID NO: 18604 - protein, 17 aa, Homo sapiens
YPWFGEAHNYYYYGMEV

SEQ ID NO: 18605 - protein, 10 aa, Homo sapiens
YQIAEGYFDF

SEQ ID NO: 18606 - protein, 11 aa, Homo sapiens
YQSDSDKEQGS

SEQ ID NO: 18607 - protein, 6 aa, Homo sapiens
YQWLGD

SEQ ID NO: 18608 - protein, 16 aa, Homo sapiens
YRAIRAVISYYYIMDV

SEQ ID NO: 18609 - protein, 11 aa, Homo sapiens
YRSDSDKQRGS

SEQ ID NO: 18610 - protein, 9 aa, Homo sapiens
YSAADNIGV

SEQ ID NO: 18611 - protein, 9 aa, Homo sapiens
YSAADNKGV

SEQ ID NO: 18612 - protein, 9 aa, Homo sapiens
YSAADNKGV

SEQ ID NO: 18613 - protein, 10 aa, Homo sapiens
YSAADNNPPV

SEQ ID NO: 18614 - protein, 10 aa, Homo sapiens
YSAADNSRRV

SEQ ID NO: 18615 - protein, 9 aa, Homo sapiens
YSAADNSWV

SEQ ID NO: 18616 - protein, 9 aa, Homo sapiens
YSASDNIVF

SEQ ID NO: 18617 - protein, 9 aa, Homo sapiens
YSATDNTWV

SEQ ID NO: 18618 - protein, 10 aa, Homo sapiens
YSDYGPPSGD

SEQ ID NO: 18619 - protein, 11 aa, Homo sapiens
YSTDRSGNHYV

SEQ ID NO: 18620 - protein, 11 aa, Homo sapiens
YSTDSSGNHRV

SEQ ID NO: 18621 - protein, 5 aa, Homo sapiens
YSTIS

SEQ ID NO: 18622 - protein, 10 aa, Homo sapiens
YSVADRTVRF

SEQ ID NO: 18623 - protein, 5 aa, Homo sapiens
YSYLN

SEQ ID NO: 18624 - protein, 11 aa, Homo sapiens
YSYSESYPFDY

SEQ ID NO: 18625 - protein, 11 aa, Homo sapiens
YSYSGSYTFWV

SEQ ID NO: 18626 - protein, 17 aa, Homo sapiens
YTDKNSKTIYYAVSIKG

SEQ ID NO: 18627 - protein, 16 aa, Homo sapiens
YTPAPGRNYYFFYMDV

SEQ ID NO: 18628 - protein, 11 aa, Homo sapiens
YTSDSDKEHGS

SEQ ID NO: 18629 - protein, 11 aa, Homo sapiens
YTSDSDKQQGS

SEQ ID NO: 18630 - protein, 16 aa, Homo sapiens
YTTYTGRTDYNPSLKS

SEQ ID NO: 18631 - protein, 16 aa, Homo sapiens
YVHSSGSPTYTPSLNS

SEQ ID NO: 18632 - protein, 16 aa, Homo sapiens
YVHYRGRVNYNPSLKS

SEQ ID NO: 18633 - protein, 16 aa, Homo sapiens
YVHYSGSTNYSPSLKS

SEQ ID NO: 18634 - protein, 16 aa, Homo sapiens
YVSYNGNTIYSPSLES

SEQ ID NO: 18635 - protein, 16 aa, Homo sapiens
YVSYSGSTNYNPSLQS

SEQ ID NO: 18636 - protein, 5 aa, Homo sapiens
YYGFN

SEQ ID NO: 18637 - protein, 5 aa, Homo sapiens
YYGLS

SEQ ID NO: 18638 - protein, 5 aa, Homo sapiens
YYGMH

SEQ ID NO: 18639 - protein, 5 aa, Homo sapiens
YYSIS

SEQ ID NO: 18640 - protein, 5 aa, Homo sapiens
YYYIH

SEQ ID NO: 18641 - protein, 5 aa, Homo sapiens
YYYMN

SEQ ID NO: 18642 - protein, 5 aa, synthetic construct
GSGGS

SEQ ID NO: 18643 - protein, 4 aa, synthetic construct
GGGS

SEQ ID NO: 18644 - protein, 4 aa, synthetic construct
GGSG

SEQ ID NO: 18645 - protein, 5 aa, synthetic construct
GGSGG

SEQ ID NO: 18646 - protein, 5 aa, synthetic construct
GSGSG

SEQ ID NO: 18647 - protein, 5 aa, synthetic construct
GSGGG

SEQ ID NO: 18648 - protein, 5 aa, synthetic construct
GGGSG

SEQ ID NO: 18649 - protein, 5 aa, synthetic construct
GSSSG

SEQ ID NO: 18650 - protein, 10 aa, synthetic construct
ISGSGGSTYY

SEQ ID NO: 18651 - protein, 10 aa, synthetic construct
ISYDGSNKYY

SEQ ID NO: 18652 - protein, 10 aa, synthetic construct
ISSSSSTIYY

SEQ ID NO: 18653 - protein, 116 aa, Homo sapiens
EVQLVESGGGLVQPGGSLRLSCAASGFTFSSYSMNWVRQAPGKGLEWVSYISSSSSTIYYADSVKGRFTISRDNAKNSLYLQMNSLRDEDTAVYYCARSAYYGDVWGQGTTVTVSS

SEQ ID NO: 18654 - protein, 121 aa, Homo sapiens
EVQLVESGGGLVQPGRSLRLSCAASGFTFRSYSMNWVRQAPEKGLEWLAYISESSLSIYYADSVKGRFIISRDNAKNSVHLQMNSLRDEDTAVYYCARSRAAAYYYGLDVWGQGTTSPSPQ

SEQ ID NO: 18655 - protein, 121 aa, Homo sapiens; identical to SEQ ID NO: 8796

SEQ ID NO: 18656 - protein, 11 aa, Homo sapiens
NIKQDGSEKYY

SEQ ID NO: 18657 - protein, 11 aa, Homo sapiens
GISWNSGSIGY

SEQ ID NO: 18658 - protein, 11 aa, Homo sapiens
YISSSGSTIYY

SEQ ID NO: 18659 - protein, 10 aa, Homo sapiens
AIGTAGDTYY

SEQ ID NO: 18660 - protein, 13 aa, Homo sapiens
RIKSKTDGGTTDY

SEQ ID NO: 18661 - protein, 11 aa, Homo sapiens
GINWNGGSTGY

SEQ ID NO: 18662 - protein, 11 aa, Homo sapiens
SISSSSSYIYY

SEQ ID NO: 18663 - protein, 11 aa, Homo sapiens
VIWYDGSNKYY

SEQ ID NO: 18664 - protein, 11 aa, Homo sapiens
LISGDGGSTYY

SEQ ID NO: 18665 - protein, 13 aa, Homo sapiens
FIRSKAYGGTTEY

SEQ ID NO: 18666 - protein, 10 aa, Homo sapiens
VIYSGGSTYY

SEQ ID NO: 18667 - protein, 13 aa, Homo sapiens
RTRNKANSYTTEY

SEQ ID NO: 18668 - protein, 11 aa, Homo sapiens
RINSDGSSTSY
